(19) United States
(12) Patent Application Publication
(10) Pub. No.: US 2025/0161485 A1
(43) Pub. Date: May 22, 2025

(54) AAV CAPSID VARIANTS AND USES THEREOF

(71) Applicant: VOYAGER THERAPEUTICS, INC., Lexington, MA (US)

(72) Inventors: Mathieu Emmanuel Nonnenmacher, Boston, MA (US); Amy Zhen Ren, Newton, MA (US); Damien Maura, Somerville, MA (US); Wei Wang, Lexington, MA (US)

(21) Appl. No.: 18/835,280

(22) PCT Filed: Feb. 7, 2023
(86) PCT No.: PCT/US2023/062101

§ 371 Date: Aug. 1, 2024

Related U.S. Application Data
(60) Provisional application No. 63/339,574, filed on May 9, 2022.
(60) Provisional application No. 63/307,742, filed on Feb. 8, 2022.

(51) Int. Cl. A61K 48/00; C07K 14/005; C12N 15/86

(52) U.S. Cl. CPC A61K 48/0041; A61K 48/0075; C07K 14/005; C12N 15/86; C12N 2750/14122; C12N 2750/14143; C12N 2750/14145; C12N 2750/14151; C12N 2830/50

(57) ABSTRACT

The disclosure relates to compositions and methods for the preparation, use, and/or formulation of adeno-associated virus capsid protein variants.

### RELATED APPLICATIONS

[0001] This application claims priority to U.S. Provisional Application No. 63/307,742 filed on Feb. 8, 2022 and U.S. Provisional Application No. 63/339,574 filed on May 9, 2022; the entire contents of each of which are hereby incorporated by reference in their entirety.

### SEQUENCE LISTING

[0002] This instant application contains a Sequence Listing which has been submitted electronically in XML format and is hereby incorporated by reference in its entirety. Said XML copy, created on Jan. 24, 2023, is named V2071-1111PCT_SL.xml and is 2,233,613 bytes in size.

### FIELD OF THE DISCLOSURE

[0003] The disclosure relates to compositions and methods for the preparation, use, and/or formulation of adeno-associated virus capsid proteins and variants thereof.

### BACKGROUND

[0004] Gene delivery to the central nervous system (CNS) remains a significant challenge in gene therapy. Engineered adeno-associated virus (AAV) capsids with improved brain tropism represent an attractive solution to the limitations of CNS delivery.

[0005] AAV-derived vectors are promising tools for clinical gene transfer because of their non-pathogenic nature, their low immunogenic profile, low rate of integration into the host genome and long-term transgene expression in non-dividing cells. However, the transduction efficiency of AAV natural variants in certain organs is too low for clinical applications, and capsid neutralization by pre-existing neutralizing antibodies may prevent treatment of a large proportion of patients. For these reasons, considerable efforts have been devoted to obtaining capsid variants with enhanced properties. Of many approaches tested so far, significant advances have resulted from directed evolution of AAV capsids using in vitro or in vivo selection of capsid variants created by capsid sequence randomization using either error-prone PCR, shuffling of various parent serotypes, or insertion of fully randomized short peptides at defined positions.

[0006] Attempts at providing AAV capsids with improved properties, e.g., improved tropism to a target cell or tissue upon systemic administration, have had limited success. As such, there is a need for improved methods of producing AAV capsids and resulting AAV capsids for delivery of a payload of interest to a target cell or tissue, e.g., a CNS cell or tissue, or a muscle cell or tissue.

### SUMMARY OF THE DISCLOSURE

[0007] The present disclosure pertains, at least in part, to compositions and methods for the production and use of an AAV particle comprising an AAV capsid polypeptide, e.g., an AAV capsid variant (e.g., an AAV5 capsid variant). In some embodiments, the AAV capsid variant has an enhanced tropism for a tissue or a cell, e.g., a CNS tissue, a CNS cell, a heart cell, a heart tissue, a muscle cell, a muscle tissue, a liver cell, or a liver tissue. Said tropism can be useful for delivery of a payload, e.g., a payload described herein, to a cell or tissue, for the treatment of a disorder, e.g., a neurological or a neurodegenerative disorder, a muscular or a neuromuscular disorder, or a neuro-oncological disorder.

[0008] Accordingly, in one aspect, the present disclosure provides an AAV capsid variant, e.g., an AAV5 capsid variant, which comprises an amino acid other than T at position 577 (e.g., Y, N, or C), numbered relative to SEQ ID NO: 138. In some embodiments, the AAV capsid variant comprises a Y at position 577, numbered relative to SEQ ID NO: 138. In some embodiments, the AAV capsid variant comprises a N at position 577, numbered relative to SEQ ID NO: 138. In some embodiments, the AAV capsid variant comprises a C at position 577, numbered relative to SEQ ID NO: 138.

[0009] In another aspect, the present disclosure provides an AAV capsid variant, e.g., a variant of the wild-type AAV5 capsid, which comprises more than one amino acid that replaces the threonine (T) at position 577, numbered relative to SEQ ID NO: 138. In some embodiments, an insert of two, three, four, five, six, seven, eight, nine, or ten amino acids replaces the T at position 577, numbered relative to SEQ ID NO: 138. In some embodiments an insert of eight amino acids replaces the T at position 577, numbered relative to SEQ ID NO: 138.

[0010] In another aspect, the present disclosure provides an AAV capsid variant (e.g., an AAV5 capsid variant) comprising the formula [N2]-[N3], wherein: (i) [N2] comprises positions X1, X2, X3, X4, and X5, wherein: (a) position X1 is Y, N, or C; (b) position X2 is P, K, T, or Q; (c) position X3 is A or P; (d) position X4 is E, S, or A; and (e) position X5 is V, L, or E; and (ii) the amino acid sequence of [N3] comprises the amino acid sequence of VQK, EQK, VKK, VHK, VQQ, or LQK; and optionally wherein the AAV capsid variant comprises an amino acid modification, e.g., a conservative substitution, of any of the aforesaid amino acids in (i) and/or (ii); optionally wherein [N2]-[N3] is present immediately subsequent to position 576, numbered relative to SEQ ID NO: 138 and replaces position 577, numbered relative to SEQ ID NO: 138. In some embodiments, [N2] comprises Y at position X1. In some embodiments, [N2] comprises P at position X2. In some embodiments, [N2] comprises A at position X3. In some embodiments, [N2] comprises E at position X4. In some embodiments, [N2] comprises V at position X5. In some embodiments, the amino acid sequence of [N3] is VQK. In some embodiments, X1 of [N2] is present at position 577, X2 of [N2] is present at position 578, X3 of [N2] is present at position 579, X4 of [N2] is present at position 580, and of X5 of [N2] is present at position 581, numbered according to SEQ ID NO: 982. In some embodiments, [N2] is present at positions 577-581, numbered according to SEQ ID NO: 982. In some embodiments, [N3] is present at positions 582-584, numbered according to SEQ ID NO: 982. In some embodiments, [N2]-[N3] is present at positions 577-584, numbered according to SEQ ID NO: 982.

[0011] In some embodiments, the amino acid sequence of [N2] consists of YPAEV (SEQ ID NO: 1). In some embodiments, the amino acid sequence of [N3] consists of VQK. In some embodiments, [N2]-[N3] replaces the threonine (T) at position 577 of wild-type AAV5, e.g., SEQ ID NO: 138. In some embodiments, [N2]-[N3] replaces the threonine (T) at position 577 of wild-type AAV5, e.g., SEQ ID NO: 138, and the amino acid sequence of [N2] consists of YPAEV (SEQ ID NO: 1), and the amino acid sequence of [N3] consists of VQK. In some embodiments, [N2] is present at positions 577-581, numbered according to SEQ ID NO: 982. In some embodiments, [N3] is present at positions 582-584, numbered according to SEQ ID NO: 982. In some embodiments, [N2]-[N3] is present at positions 577-584, numbered according to SEQ ID NO: 982.

[0012] In another aspect, the present disclosure provides an AAV capsid variant (e.g., an AAV5 capsid variant) comprising one, two, three, or all of: (i) an [N0], wherein the amino acid sequence of [N0] comprises TNN, TNT, INN, TNS, NNN, or TNK; (ii) an [N1], wherein the amino acid sequence of [N1] comprises QSS, QSK, TSL, SSS, QSR, AGA, IGS, QAS, ASS, LGS, QST, HSS, LSS, or QRS; (iii) an [N2], wherein the amino acid sequence of [N2] comprises YPAEV (SEQ ID NO: 1), YPPSL (SEQ ID NO: 2), NKAEV (SEQ ID NO: 3), YTAEV (SEQ ID NO: 4), YPAEE (SEQ ID NO: 5), YQAEV (SEQ ID NO: 6), YTPSL (SEQ ID NO: 7), YPAAV (SEQ ID NO: 8), NPAEV (SEQ ID NO: 9), CPAEV (SEQ ID NO: 10), or YQAEE (SEQ ID NO: 11); (iv) an [N3], wherein the amino acid sequence of [N3] comprises VQK, EQK, VKK, VHK, VQQ, or LQK; and/or (v) an [N4], wherein the amino acid sequence of [N4] comprises TA, PA, or NA; and optionally wherein the AAV capsid variant comprises an amino acid modification, e.g., a conservative substitution, of any of the aforesaid amino acids in (i)-(v); optionally wherein [N0] is present immediately subsequent to position 570, numbered relative to SEQ ID NO: 138. In some embodiments, the amino acid sequence of [N0] is TNN. In some embodiments, the amino acid sequence of [N1] is QSS. In some embodiments, the amino acid sequence of [N2] is YPAEV (SEQ ID NO: 1). In some embodiments, the amino acid sequence of [N3] is VQK. In some embodiments, the amino acid sequence of [N4] is TA. In some embodiments, the amino acid sequence of [N0] is TNN, the amino acid sequence of [N1] is QSS, the amino acid sequence of [N2] is YPAEV (SEQ ID NO: 1), the amino acid sequence of [N3] is VQK, and/or the amino acid sequence of [N4] is TA. In some embodiments, the amino acid sequence of [N0] is TNN, the amino acid sequence of [N1] is QSS, the amino acid sequence of [N2] is YPAEV (SEQ ID NO: 1), the amino acid sequence of [N3] is VQK, and the amino acid sequence of [N4] is TA. In any of these embodiments, [N0] is present immediately subsequent to position 570, numbered relative to SEQ ID NO: 138. In any of these embodiments, [N0] replaces positions 571-573 (e.g., T571, N572, and N573), numbered relative to SEQ ID NO: 138. In any of these embodiments, [N0] is present immediately subsequent to position 570, and [N0] positions 571-573 (e.g., T571, N572, and N573), numbered relative to SEQ ID NO: 138. In any of these embodiments, [N1] is present immediately subsequent to position 573, numbered relative to SEQ ID NO: 138. In any of these embodiments, [N1] replaces positions 574-576 (e.g., Q574, S575, and S576), numbered relative to SEQ ID NO: 138. In any of these embodiments, [N1] is present immediately subsequent to position 573, and [N1] replaces positions 574-576 (e.g., Q574, S575, and S576), numbered relative to SEQ ID NO: 138. In any of these embodiments, [N2] is present immediately subsequent to position 576, numbered relative to SEQ ID NO: 138. In any of these embodiments, [N2] replaces position 577 (e.g., T577), numbered relative to SEQ ID NO: 138. In any of these embodiments, [N2] is present immediately subsequent to position 576, and [N2] replaces position 577 (e.g., T577), numbered relative to SEQ ID NO: 138. In any of these embodiments, [N2]-[N3] is present immediately subsequent to position 576, numbered relative to SEQ ID NO: 138. In any of these embodiments, [N2]-[N3] replaces position 577 (e.g., T577), numbered relative to SEQ ID NO: 138. In any of these embodiments, [N2]-[N3] is present immediately subsequent to position 576, and [N2]-[N3] replaces position 577 (e.g., T577), numbered relative to SEQ ID NO: 138. In any of these embodiments, [N2]-[N3]-[N4] replaces positions 577-579 (e.g., T577, T578, and A579), numbered relative to SEQ ID NO: 138. In any of these embodiments, [N2]-[N3]-[N4] is present immediately subsequent to position 576, and [N2]-[N3]-[N4] replaces positions 577-579 (e.g., T577, T578, and A579), numbered relative to SEQ ID NO: 138. In any of these embodiments, [N0]-[N1]-[N2]-[N3]-[N4] is present immediately subsequent to position 570, numbered relative to SEQ ID NO: 138. In some embodiments, [N0]-[N1]-[N2]-[N3]-[N4] replaces positions 571-579 (e.g., T571, N572, N573, Q574, S575, S576, T577, T578, and A579), numbered relative to SEQ ID NO: 138. In some embodiments, [N0]-[N1]-[N2]-[N3]-[N4] is present immediately subsequent to position 570, and [N0]-[N1]-[N2]-[N3]-[N4] replaces positions 571-579 (e.g., T571, N572, N573, Q574, S575, S576, T577, T578, and A579), numbered relative to SEQ ID NO: 138. For example, in some embodiments, [N0]-[N1]-[N2]-[N3]-[N4] is TNNQSSYPAEVVQKTA (SEQ ID NO: 1533) and is present immediately subsequent to position 570, numbered relative to SEQ ID NO: 138, wherein [N2]-[N3] (YPAEVVQK (SEQ ID NO: 943)) replaces position 577 (e.g., replaces T577), numbered relative to SEQ ID NO: 138. In some embodiments, [N0] is present at positions 571-573, numbered according to SEQ ID NO: 982. In some embodiments, [N1] is present at positions 574-576, numbered according to SEQ ID NO: 982. In some embodiments, [N2] is present at positions 577-581, numbered according to SEQ ID NO: 982. In some embodiments, [N3] is present at positions 582-584, numbered according to SEQ ID NO: 982. In some embodiments, [N4] is present at positions 585-586, numbered according to SEQ ID NO: 982. In some embodiments, [N2]-[N3] is present at positions 577-584, numbered according to SEQ ID NO: 982. In some embodiments, [N0]-[N1]-[N2]-[N3]-[N4] is present at positions 571-586, numbered according to SEQ ID NO: 982.

[0013] In yet another aspect, the present disclosure provides an AAV capsid variant (e.g., an AAV5 capsid variant) comprising the formula [B]-[C], wherein: (i) [B] comprises positions X1, X2, and X3, wherein: (a) position X1 is Q, T, S, A, I, L, or H; (b) position X2 is S, G, or A; and (c) position X3 is S, K, L, R, or A; and (ii) [C] comprises the amino acid sequence of YPAEVVQK (SEQ ID NO: 943); and optionally wherein the AAV capsid variant comprises an amino acid modification, e.g., a conservative substitution, of any of the aforesaid amino acids in (i) and/or (ii); and further optionally wherein [B] is present immediately subsequent to position 573, numbered relative to SEQ ID NO: 138. In some embodiments, [B] comprises Q at position X1. In some embodiments, [B] comprises S at position X2. In some embodiments, [B] comprises S at position X3. In some embodiments, the amino acid sequence of [B] is QSS. In some embodiments, [B] is present immediately subsequent to position 573, relative to a reference sequence numbered according to SEQ ID NO: 138. In some embodiments, [B] replaces positions 574-576 (e.g., Q574, S575, and S576), relative to a reference sequence numbered according to SEQ ID NO: 138. In some embodiments, [B] is present immediately subsequent to position 573, and [B] replaces positions 574-576 (e.g., Q574, S575, and S576), relative to a reference sequence numbered according to SEQ ID NO: 138. In some embodiments, [C] is present immediately subsequent to position 576, relative to a reference sequence numbered according to SEQ ID NO: 138. In some embodiments, [C] replaces position 577 (e.g., T577), relative to a reference sequence numbered according to SEQ ID NO: 138. In some embodiments, [C] is present immediately subsequent to position 576, and [C] replaces position 577 (e.g., T577), relative to a reference sequence numbered according to SEQ ID NO: 138. In some embodiments, [B]-[C] is present immediately subsequent to position 573, relative to a reference sequence numbered according to SEQ ID NO: 138. In some embodiments, [B]-[C] replaces positions 574-577 (e.g., Q574, S575, S576, and T577), relative to a reference sequence numbered according to SEQ ID NO: 138. In some embodiments, [B]-[C] is present immediately subsequent to position 573, and [B]-[C] replaces positions 574-577 (e.g., Q574, S575, S576, and T577), relative to a reference sequence numbered according to SEQ ID NO: 138. In some embodiments, X1 of [B] is present at position 574, X2 of [B] is present at position 575, and X3 of [B] is present at position 576, numbered according to SEQ ID NO: 982. In some embodiments, [B] is present at positions 574-576, numbered according to SEQ ID NO: 982. In some embodiments, [C] is present at positions 577-584, numbered according to SEQ ID NO: 982. In some embodiments, [B]-[C] is present at positions 574-584, numbered according to SEQ ID NO: 982.

[0014] In another aspect, the present disclosure provides an AAV capsid variant (e.g., an AAV5 capsid variant) comprising one, two, three, or all of (i) an [A], wherein the amino acid sequence of [A] comprises TNN, TNT, INN, NNN, TNS, or TNK; (ii) a [B], wherein the amino acid sequence of [B] comprises QSS, TSL, SSS, QSR, QSK, AGA, IGS, QAS, ASS, LGS, or HSS; (iii) a [C], wherein [C] comprises the amino acid sequence of YPAEVVQK (SEQ ID NO: 943); and (iv) a [D], wherein [D] comprises the amino acid sequence of TA or PA; and optionally wherein the AAV capsid variant comprises an amino acid modification, e.g., a conservative substitution, of any of the aforesaid amino acids in (i)-(v); optionally wherein [A] is present immediately subsequent to position 570, numbered relative to SEQ ID NO: 138 and [C] replaces position 577, numbered relative to SEQ ID NO: 138. In some embodiments, the amino acid sequence of [A] is TNN. In some embodiments, the amino acid sequence of [B] is QSS. In some embodiments, the amino acid sequence of [A] is TNN and the amino acid sequence of [B] is QSS. In some embodiments, the amino acid sequence of [A] is TNN, the amino acid sequence of [B] is QSS, and the amino acid sequence of [C] is YPAEVVQK (SEQ ID NO: 943). In some embodiments, the amino acid sequence of [A] is TNN, the amino acid sequence of [B] is QSS, the amino acid sequence of [C] is YPAEVVQK (SEQ ID NO: 943), and the amino acid sequence of [D] is TA. In any of these embodiments, [A] is present immediately subsequent to position 570, numbered relative to SEQ ID NO: 138. In any of these embodiments, [A] replaces positions 571-573 (e.g., T571, N572, and N573) numbered relative to SEQ ID NO: 138. In any of these embodiments, [A] is present immediately subsequent to position 570, and [A] replaces positions 571-573 (e.g., T571, N572, and N573) numbered relative to SEQ ID NO: 138. In any of these embodiments, [B] is present immediately subsequent to position 573, relative to a reference sequence numbered according to SEQ ID NO: 138. In any of these embodiments, [B] replaces positions 574-576 (e.g., Q574, S575, and S576), numbered relative to SEQ ID NO: 138. In any of these embodiments, [B] is present immediately subsequent to position 573, and [B] replaces positions 574-576 (e.g., Q574, S575, and S576), numbered relative to SEQ ID NO: 138. In any of these embodiments, [C] is present immediately subsequent to position 576, numbered relative to SEQ ID NO: 138. In any of these embodiments, [C] replaces position 577 (e.g., T577), numbered relative to SEQ ID NO: 138. In any of these embodiments, [C] is present immediately subsequent to position 576, and [C] replaces position 577 (e.g., T577), numbered relative to SEQ ID NO: 138. In any of these embodiments, [B]-[C] is present immediately subsequent to position 573, numbered relative to SEQ ID NO: 138. In any of these embodiments, [B]-[C] replaces positions 574-577 (e.g., Q574, S575, S576, and T577), numbered relative to SEQ ID NO: 138. In any of these embodiments, [B]-[C] is present immediately subsequent to position 573, and [B]-[C] replaces positions 574-577 (e.g., Q574, S575, S576, and T577), numbered relative to SEQ ID NO: 138. In any of these embodiments, [C]-[D] is present immediately subsequent to position 576, numbered relative to SEQ ID NO: 138. In any of these embodiments, [C]-[D] replaces positions 577-579 (e.g., T577, T578, and A579), numbered relative to SEQ ID NO: 138. In any of these embodiments, [A]-[B]-[C]-[D] is present immediately subsequent to position 570, numbered relative to SEQ ID NO: 138. In any of these embodiments, [A]-[B]-[C]-[D] replaces positions 571-579 (e.g., T571, N572, N573, Q574, S575, S576, T577, T578, and A579), numbered relative to SEQ ID NO: 138. In any of these embodiments, [A]-[B]-[C]-[D] is present immediately subsequent to position 570, and [A]-[B]-[C]-[D] replaces positions 571-579 (e.g., T571, N572, N573, Q574, S575, S576, T577, T578, and A579), numbered relative to SEQ ID NO: 138. For example, in some embodiments, [A]-[B]-[C]-[D] is TNNQSSYPAEVVQKTA (SEQ ID NO: 1533) and is present immediately subsequent to position 570, numbered relative to SEQ ID NO: 138, wherein [C] (YPAEVVQK (SEQ ID NO: 943)) replaces position 577 (e.g., replaces T577) numbered relative to SEQ ID NO: 138. In some embodiments, [A] is present at positions 571-573, numbered according to SEQ ID NO: 982. In some embodiments, [B] is present at positions 574-576, numbered according to SEQ ID NO: 982. In some embodiments, [C] is present at positions 577-584, numbered according to SEQ ID NO: 982. In some embodiments, [D] is present at positions 585-586, numbered according to SEQ ID NO: 982. In some embodiments, [A]-[B]-[C]-[D] is present at positions 571-586, numbered according to SEQ ID NO: 982.

[0015] In yet another aspect, the present disclosure provides an AAV capsid variant (e.g., an AAV5 capsid variant) comprising the formula [N2]-[N3], wherein: (i) [N2] comprises positions X1, X2, X3, X4, and X5, wherein: (a) position X1 is Y or T; (b) position X2 is Q, T, P, or E; (c) position X3 is A; (d) position X4 is E or D; and (e) position X5 is V or E; and (ii) [N3] comprises the amino acid sequence of VQK or VQN; and optionally wherein the AAV capsid variant comprises an amino acid modification, e.g., a conservative substitution, of any of the aforesaid amino acids in (i) and/or (ii); and further optionally wherein [N2]-[N3] is present immediately subsequent to position 576, numbered relative to SEQ ID NO: 138 and replaces position 577, numbered relative to SEQ ID NO: 138. In some embodiments, the amino acid sequence of [N2] consists of YPAEV (SEQ ID NO: 1). In some embodiments, the amino acid sequence of [N3] consists of VQK. In some embodiments, [N2]-[N3] replaces position 577 (e.g., T577) of wild-type AAV5, e.g., SEQ ID NO: 138. In some embodiments, [N2]-[N3] replaces the threonine (T) at position 577 of wild-type AAV5, e.g., SEQ ID NO: 138, and the amino acid sequence of [N2] consists of YPAEV (SEQ ID NO: 1), and the amino acid sequence of [N3] consists of VQK. In some embodiments, X1 of [N2] is present at position 577, X2 of [N2] is present at position 578, X3 of [N2] is present at position 579, X4 of [N2] is present at position 580, and of X5 of [N2] is present at position 581, numbered according to SEQ ID NO: 982. In some embodiments, [N2] is present at positions 577-581, numbered according to SEQ ID NO: 982. In some embodiments, [N3] is present at positions 582-584, numbered according to SEQ ID NO: 982. In some embodiments, [N2]-[N3] is present at positions 577-584, numbered according to SEQ ID NO: 982.

[0016] In another aspect, the present disclosure provides an AAV capsid variant (e.g., an AAV5 capsid variant) comprising one, two, three, four, or all of: (i) an [N0], wherein [N0] comprises the amino acid sequence of TNN, TNS, TNT, or TNK; (ii) an [N1], wherein [N1] comprises the amino acid of QSS, SLS, SLY, SAT, or QTS; (iii) an [N2] wherein [N2] comprises the amino acid sequence of YPAEV (SEQ ID NO: 1), YQAEV (SEQ ID NO: 6), YTAEV (SEQ ID NO: 4), YPAEE (SEQ ID NO: 5), TEAEV (SEQ ID NO: 12), or YPADV (SEQ ID NO: 13); (iv) an [N3] wherein [N3] comprises the amino acid sequence of VQK or VQN; and/or (v) an [N4] wherein [N4] comprises the amino acid sequence of TA, PA, TD, NA, or PA; and optionally wherein the AAV capsid variant comprises an amino acid modification, e.g., a conservative substitution, of any of the aforesaid amino acids in (i)-(v); and further optionally wherein [N0] is present immediately subsequent to position 570, numbered relative to SEQ ID NO: 138 and [N2]-[N3] replaces position 577, numbered relative to SEQ ID NO: 138. In any of these embodiments, [N0] is present immediately subsequent to position 570, numbered relative to SEQ ID NO: 138. In any of these embodiments, [N0] replaces positions 571-573 (e.g., T571, N572, and N573), numbered relative to SEQ ID NO: 138. In any of these embodiments, [N0] is present immediately subsequent to position 570, and [N0] replaces positions 571-573 (e.g., T571, N572, and N573), numbered relative to SEQ ID NO: 138. In any of these embodiments, [N1] is present immediately subsequent to position 573, numbered relative to SEQ ID NO: 138. In any of these embodiments, [N1] replaces positions 574-576 (e.g., Q574, S575, and S576), numbered relative to SEQ ID NO: 138. In any of these embodiments, [N1] is present immediately subsequent to position 573, and [N1] replaces positions 574-576 (e.g., Q574, S575, and S576), numbered relative to SEQ ID NO: 138. In any of these embodiments, [N2] is present immediately subsequent to position 576, numbered relative to SEQ ID NO: 138. In any of these embodiments, [N2] replaces position 577 (e.g., T577), numbered relative to SEQ ID NO: 138. In any of these embodiments, [N2] is present immediately subsequent to position 576, and [N2] replaces position 577 (e.g., T577), numbered relative to SEQ ID NO: 138. In any of these embodiments, [N2]-[N3] is present immediately subsequent to position 576, numbered relative to SEQ ID NO: 138. In any of these embodiments, [N2]-[N3] replaces position 577 (e.g., T577), numbered relative to SEQ ID NO: 138. In any of these embodiments, [N2]-[N3] is present immediately subsequent to position 576, and [N2]-[N3] replaces position 577 (e.g., T577), numbered relative to SEQ ID NO: 138. In any of these embodiments, [N2]-[N3]-[N4] replaces positions 577-579 (e.g., T577, T578, and A579), numbered relative to SEQ ID NO: 138. In any of these embodiments, [N2]-[N3]-[N4] is present immediately subsequent to position 576, and [N2]-[N3]-[N4] replaces positions 577-579 (e.g., T577, T578, and A579), numbered relative to SEQ ID NO: 138. In any of these embodiments, [N0]-[N1]-[N2]-[N3]-[N4] is present immediately subsequent to position 570, numbered relative to SEQ ID NO: 138. In any of these embodiments, [N0]-[N1]-[N2]-[N3]-[N4] replaces positions 571-579 (e.g., T571, N572, N573, Q574, S575, S576, T577, T578, and A579), relative to a reference sequence numbered according to SEQ ID NO: 138. In any of these embodiments, [N0]-[N1]-[N2]-[N3]-[N4] is present immediately subsequent to position 570, and [N0]-[N1]-[N2]-[N3]-[N4] replaces positions 571-579 (e.g., T571, N572, N573, Q574, S575, S576, T577, T578, and A579), relative to a reference sequence numbered according to SEQ ID NO: 138. In some embodiments, [N0] is present at positions 571-573, numbered according to SEQ ID NO: 982. In some embodiments, [N1] is present at positions 574-576, numbered according to SEQ ID NO: 982. In some embodiments, [N2] is present at positions 577-581, numbered according to SEQ ID NO: 982. In some embodiments, [N3] is present at positions 582-584, numbered according to SEQ ID NO: 982. In some embodiments, [N4] is present at positions 585-586, numbered according to SEQ ID NO: 982. In some embodiments, [N2]-[N3] is present at positions 577-584, numbered according to SEQ ID NO: 982. In some embodiments, [N0]-[N1]-[N2]-[N3]-[N4] is present at positions 571-586, numbered according to SEQ ID NO: 982.

[0017] In some embodiments, the amino acid sequence of [N0] is TNN, the amino acid sequence of [N1] is QSS, the amino acid sequence of [N2] is YPAEV (SEQ ID NO: 1), the amino acid sequence of [N3] is VQK, and/or the amino acid sequence of [N4] is TA. In some embodiments, the amino acid sequence of [N0] is TNN, the amino acid sequence of [N1] is QSS, the amino acid sequence of [N2] is YPAEV (SEQ ID NO: 1), the amino acid sequence of [N3] is VQK, and the amino acid sequence of [N4] is TA. In any of these embodiments, [N0]-[N1]-[N2]-[N3]-[N4] is present immediately subsequent to position 570, numbered relative to SEQ ID NO: 138. In any of these embodiments, the amino acid sequence of [N2]-[N3] replaces position 577, numbered relative to SEQ ID NO: 138. For example, in some embodiments, [N0]-[N1]-[N2]-[N3]-[N4] is TNNQSSYPAEVVQKTA (SEQ ID NO: 1533) and is present immediately subsequent to position 570, numbered relative to SEQ ID NO: 138, wherein [N2]-[N3] (YPAEVVQK (SEQ ID NO: 943)) replaces position 577 (e.g., replaces T577) numbered relative to SEQ ID NO: 138. In some embodiments, [N0] is present at positions 571-573, numbered according to SEQ ID NO: 982. In some embodiments, [N1] is present at positions 574-576, numbered according to SEQ ID NO: 982. In some embodiments, [N2] is present at positions 577-581, numbered according to SEQ ID NO: 982. In some embodiments, [N3] is present at positions 582-584, numbered according to SEQ ID NO: 982. In some embodiments, [N4] is present at positions 585-586, numbered according to SEQ ID NO: 982. In some embodiments, [N2]-[N3] is present at positions 577-584, numbered according to SEQ ID NO: 982. In some embodiments, [N0]-[N1]-[N2]-[N3]-[N4] is present at positions 571-586, numbered according to SEQ ID NO: 982.

[0018] In another aspect, the present disclosure provides an AAV capsid variant (e.g., an AAV5 capsid variant) comprising [B]-[C], wherein: (i) [B] comprises positions X1, X2, and X3, wherein (a) position X1 is Q or S; (b) position X2 is S, L, or A; and (c) position X3 is S, Y, or T; and (ii) [C] comprises the amino acid sequence of YPAEVVQK (SEQ ID NO: 943); and optionally wherein the AAV capsid variant comprises an amino acid modification, e.g., a conservative substitution, of any of the aforesaid amino acids in (i) and/or (ii); and further optionally wherein [B] is present immediately subsequent to position 573, numbered relative to SEQ ID NO: 138, and [C] replaces position 577, numbered relative to SEQ ID NO: 138. In some embodiments, [B] is QSS. In some embodiments, [C] consists of YPAEVVQK (SEQ ID NO: 943), is present immediately subsequent to position 576, numbered relative to SEQ ID NO: 138, and replaces position 577, numbered relative to SEQ ID NO: 138. In some embodiments, [B] is present immediately subsequent to position 573, relative to a reference sequence numbered according to SEQ ID NO: 138. In some embodiments, [B] replaces positions 574-576 (e.g., Q574, S575, and S576), relative to a reference sequence numbered according to SEQ ID NO: 138. In some embodiments, [B] is present immediately subsequent to position 573, and [B] replaces positions 574-576 (e.g., Q574, S575, and S576), relative to a reference sequence numbered according to SEQ ID NO: 138. In some embodiments, [C] is present immediately subsequent to position 576, relative to a reference sequence numbered according to SEQ ID NO: 138. In some embodiments, [C] replaces position 577 (e.g., T577), relative to a reference sequence numbered according to SEQ ID NO: 138. In some embodiments, [C] is present immediately subsequent to position 576, and [C] replaces position 577 (e.g., T577), relative to a reference sequence numbered according to SEQ ID NO: 138. In some embodiments, [B]-[C] is present immediately subsequent to position 573, relative to a reference sequence numbered according to SEQ ID NO: 138. In some embodiments, [B]-[C] replaces positions 574-577 (e.g., Q574, S575, S576, and T577), relative to a reference sequence numbered according to SEQ ID NO: 138. In some embodiments, [B]-[C] is present immediately subsequent to position 573, and [B]-[C] replaces positions 574-577 (e.g., Q574, S575, S576, and T577), relative to a reference sequence numbered according to SEQ ID NO: 138. In some embodiments, X1 of [B] is present at position 574, X2 of [B] is present at position 575, and X3 of [B] is present at position 576, numbered according to SEQ ID NO: 982. In some embodiments, [B] is present at positions 574-576, numbered according to SEQ ID NO: 982. In some embodiments, [C] is present at positions 577-584, numbered according to SEQ ID NO: 982. In some embodiments, [B]-[C] is present at positions 574-584, numbered according to SEQ ID NO: 982.

[0019] In yet another aspect, the present disclosure provides an AAV capsid variant (e.g., an AAV5 capsid variant) comprising one, two, three, four, or all of: (i) an [A], wherein [A] comprises the amino acid sequence of TNN, TNS, TNT, or TNK; (ii) a [B], wherein [B] comprises the amino acid sequence of QSS, SLY, SAT, or SLS; (iii) a [C], wherein [C] comprises the amino acid sequence of YPAEVVQK (SEQ ID NO: 943); and (iv) a [D], wherein [D] comprises the amino acid sequence of TA, TD, NA, or PA; and optionally wherein the AAV capsid variant comprises an amino acid modification, e.g., a conservative substitution, of any of the aforesaid amino acids in (i)-(v); and further optionally wherein [A] is present immediately subsequent to position 570, numbered relative to SEQ ID NO: 138, and [C] replaces position 577, numbered relative to SEQ ID NO: 138. In any of these embodiments, [A] is present immediately subsequent to position 570, numbered relative to SEQ ID NO: 138. In any of these embodiments, [A] replaces positions 571-573 (e.g., T571, N572, and N573) numbered relative to SEQ ID NO: 138. In any of these embodiments, [A] is present immediately subsequent to position 570, and [A] replaces positions 571-573 (e.g., T571, N572, and N573) numbered relative to SEQ ID NO: 138. In any of these embodiments, [B] is present immediately subsequent to position 573, relative to a reference sequence numbered according to SEQ ID NO: 138. In any of these embodiments, [B] replaces positions 574-576 (e.g., Q574, S575, and S576), relative to a reference sequence numbered according to SEQ ID NO: 138. In any of these embodiments, [B] is present immediately subsequent to position 573, and [B] replaces positions 574-576 (e.g., Q574, S575, and S576), relative to a reference sequence numbered according to SEQ ID NO: 138. In any of these embodiments, [C] is present immediately subsequent to position 576, relative to a reference sequence numbered according to SEQ ID NO: 138. In any of these embodiments, [C] replaces position 577 (e.g., T577), relative to a reference sequence numbered according to SEQ ID NO: 138. In any of these embodiments, [C] is present immediately subsequent to position 576, and [C] replaces position 577 (e.g., T577), relative to a reference sequence numbered according to SEQ ID NO: 138. In any of these embodiments, [B]-[C] is present immediately subsequent to position 573, relative to a reference sequence numbered according to SEQ ID NO: 138. In any of these embodiments, [B]-[C] replaces positions 574-577 (e.g., Q574, S575, S576, and T577), relative to a reference sequence numbered according to SEQ ID NO: 138. In any of these embodiments, [B]-[C] is present immediately subsequent to position 573, and [B]-[C] replaces positions 574-577 (e.g., Q574, S575, S576, and T577), relative to a reference sequence numbered according to SEQ ID NO: 138. In any of these embodiments, [C]-[D] is present immediately subsequent to position 576, relative to a reference sequence numbered according to SEQ ID NO: 138. In any of these embodiments, [C]-[D] replaces positions 577-579 (e.g., T577, T578, and A579), relative to a reference sequence numbered according to SEQ ID NO: 138. In any of these embodiments, [C]-[D] is present immediately subsequent to position 576, and [C]-[D] replaces positions 577-579 (e.g., T577, T578, and A579), relative to a reference sequence numbered according to SEQ ID NO: 138. In some embodiments, [A] is present at positions 571-573, numbered according to SEQ ID NO: 982. In some embodiments, [B] is present at positions 574-576, numbered according to SEQ ID NO: 982. In some embodiments, [C] is present at positions 577-584, numbered according to SEQ ID NO: 982. In some embodiments, [D] is present at positions 585-586, numbered according to SEQ ID NO: 982. In some embodiments, [A]-[B]-[C]-[D] is present at positions 571-586, numbered according to SEQ ID NO: 982.

[0020] In yet another aspect, the present disclosure provides an AAV capsid variant (e.g., an AAV5 capsid variant) comprising [K1]-[K2], wherein: (i) [K1] comprises LSY or LYY, and (ii) [K2] comprises positions X1, X2, X3, and X4, wherein (a) position X1 is Q, T, or P; (b) position X2 is A; (c) position X3 is E or D; and (d) position X4 is V or E; and optionally wherein the AAV capsid variant comprises an amino acid modification, e.g., a conservative substitution, of any of the aforesaid amino acids in (i) and/or (ii). In some embodiments, [K1]-[K2] is present immediately subsequent to position 574, relative to a reference sequence numbered according to SEQ ID NO: 138. In some embodiments, [K1]-[K2] replaces positions 575-577 (e.g., S575, S576, and T577), relative to a reference sequence numbered according to SEQ ID NO: 138. In some embodiments, [K1]-[K2] is present immediately subsequent to position 574, and [K1]-[K2] replaces positions 575-577 (e.g., S575, S576, and T577), relative to a reference sequence numbered according to SEQ ID NO: 138.

[0021] In yet another aspect, the present disclosure provides an AAV capsid variant (e.g., an AAV5 capsid variant) comprising one, two, three, four, or all of: (i) a [K0], which comprises TNNS (SEQ ID NO: 14); (ii) a [K1], which comprises LSY or LYY; (iii) a [K2], which comprises QAEV (SEQ ID NO: 15), TAEV (SEQ ID NO: 16), PAEV (SEQ ID NO: 17), PAEE (SEQ ID NO: 18), or PADV (SEQ ID NO: 19); (iv) a [K3], which comprise VQK or VQN; and (v) a [K4], which comprises TA, TD, NA, or PA; and optionally wherein the AAV capsid variant comprises an amino acid modification, e.g., a conservative substitution, of any of the aforesaid amino acids in (i)-(v). In some embodiments, [K0] is present immediately subsequent to position 570, relative to a reference sequence numbered according to SEQ ID NO: 138. In some embodiments, [K0] replaces positions 571-574 (e.g., T571, N572, N573, and Q574), relative to a reference sequence numbered according to SEQ ID NO: 138. In some embodiments, [K0] is present immediately subsequent to position 570, and [K0] replaces positions 571-574 (e.g., T571, N572, N573, and Q574), relative to a reference sequence numbered according to SEQ ID NO: 138. In some embodiments, [K1] is present immediately subsequent to position 574, relative to a reference sequence numbered according to SEQ ID NO: 138. In some embodiments, [K1] replaces positions 575-577 (e.g., S575, S576, and T577), relative to a reference sequence numbered according to SEQ ID NO: 138. In some embodiments, [K1] is present immediately subsequent to position 574, and [K1] replaces positions 575-577 (e.g., S575, S576, and T577), relative to a reference sequence numbered according to SEQ ID NO: 138. In some embodiments, [K1]-[K2]-[K3] is present immediately subsequent to position 574, relative to a reference sequence numbered according to SEQ ID NO: 138. In some embodiments, [K1]-[K2]-[K3] replaces positions 575-577 (e.g., S575, S576, and T577), relative to a reference sequence numbered according to SEQ ID NO: 138. In some embodiments, [K1]-[K2]-[K3] is present immediately subsequent to position 574, and [K1]-[K2]-[K3] replaces positions 575-577 (e.g., S575, S576, and T577), relative to a reference sequence numbered according to SEQ ID NO: 138. In some embodiments, [K1]-[K2]-[K3]-[K4] is present immediately subsequent to position 574, relative to a reference sequence numbered according to SEQ ID NO: 138. In some embodiments, [K1]-[K2]-[K3]-[K4] replaces positions 575-579 (e.g., S575, S576, T577, T578, and A579), relative to a reference sequence numbered according to SEQ ID NO: 138. In some embodiments, [K1]-[K2]-[K3]-[K4] is present immediately subsequent to position 574, and [K1]-[K2]-[K3]-[K4] replaces positions 575-579 (e.g., S575, S576, T577, T578, and A579), relative to a reference sequence numbered according to SEQ ID NO: 138. In some embodiments, [K0]-[K1]-[K2]-[K3]-[K4] is present immediately subsequent to position 570, relative to a reference sequence numbered according to SEQ ID NO 138. In some embodiments, [K0]-[K1]-[K2]-[K3]-[K4] replaces positions 571-579 (e.g., T571, N572, N573, Q574, S575, S576, T577, T578, and T579), relative to a reference sequence numbered according to SEQ ID NO 138. In some embodiments, [K0]-[K1]-[K2]-[K3]-[K4] is present immediately subsequent to position 570, and [K0]-[K1]-[K2]-[K3]-[K4] replaces positions 571-579 (e.g., T571, N572, N573, Q574, S575, S576, T577, T578, and T579), relative to a reference sequence numbered according to SEQ ID NO 138.

[0022] In yet another aspect, the present disclosure provides an AAV capsid variant (e.g., an AAV5 capsid variant) comprising: (a) the amino acid sequence of any of the sequences provided in Tables 1, 2A, 2B, 9, or 15-20; (b) an amino acid sequence comprising at least 3, 4, 5, 6, 7, 8, 9, 10, 11, 12, 13, 14, or 15 consecutive amino acids from any one of the sequences provided in Tables 1, 2A, 2B, 9, or 15-20; (c) an amino acid sequence comprising one, two, or three but no more than four different amino acids, relative to the amino acid sequence of any one of the amino acid sequences provided in Tables 1, 2A, 2B, 9, or 15-20; or (d) an amino sequence comprising one, two, or three but no more than four modifications, e.g., substitutions (e.g., conservative substitutions), insertions, or deletions, relative to the amino acid sequence of any one of the amino acid sequences provided in Tables 1, 2A, 2B, 9, or 15-20.

[0023] In yet another aspect, the present disclosure provides an AAV capsid variant (e.g., an AAV5 capsid variant) comprising: (a) the amino acid sequence of any of SEQ ID NOs: 943, 1021, 1024, 1027, 1112, 1142, 1214, 1232, 1254, 1300, 1310, 1327, 1331, 1342, 1419, 1453, 1533, 1538, 1539, 1575, 1578, 1583-1587, 1590, 1591-1593, 1598-1608, or 1610-1624; (b) an amino acid sequence comprising at least 3, 4, 5, 6, 7, 8, 9, 10, 11, 12, 13, 14, or 15 consecutive amino acids from any one of SEQ ID NOs: 943, 1021, 1024, 1027, 1112, 1142, 1214, 1232, 1254, 1300, 1310, 1327, 1331, 1342, 1419, 1453, 1533, 1538, 1539, 1575, 1578, 1583-1587, 1590, 1591-1593, 1598-1608, or 1610-1624; (c) an amino acid sequence comprising one, two, or three but no more than four different amino acids, relative to the amino acid sequence of any one of SEQ ID NOs: 943, 1021, 1024, 1027, 1112, 1142, 1214, 1232, 1254, 1300, 1310, 1327, 1331, 1342, 1419, 1453, 1533, 1538, 1539, 1575, 1578, 1583-1587, 1590, 1591-1593, 1598-1608, or 1610-1624; or (d) an amino sequence comprising one, two, or three but no more than four modifications, e.g., substitutions (e.g., conservative substitutions), insertions, or deletions, relative to the amino acid sequence of any one of SEQ ID NOs: 943, 1021, 1024, 1027, 1112, 1142, 1214, 1232, 1254, 1300, 1310, 1327, 1331, 1342, 1419, 1453, 1533, 1538, 1539, 1575, 1578, 1583-1587, 1590, 1591-1593, 1598-1608, or 1610-1624.

[0024] In another aspect, the present disclosure provides an AAV capsid variant (e.g., an AAV5 capsid variant) comprising (a) the amino acid sequence of any of SEQ ID NOs: 943 or 2064-2080; (b) an amino acid sequence comprising at least 3, 4, 5, 6, 7, 8, 9, 10, 11, 12, 13, 14, or 15 consecutive amino acids from any one of SEQ ID NOs: 943 or 2064-2080; (c) an amino acid sequence comprising one, two, or three but no more than four different amino acids, relative to the amino acid sequence of any one of SEQ ID NOs: 943 or 2064-2080; or (d) an amino sequence comprising one, two, or three but no more than four modifications, e.g., substitutions (e.g., conservative substitutions), insertions, or deletions, relative to the amino acid sequence of any one of SEQ ID NOs: 943 or 2064-2080.

[0025] In yet another aspect, present disclosure provides an AAV capsid variant (e.g., an AAV5 capsid variant) comprising the amino acid sequence of SEQ ID NO: 943. In some embodiments, the amino acid sequence of SEQ ID NO: 943 is present immediately subsequent to position 576, relative to a reference sequence numbered according to SEQ ID NO: 138 or 982. In some embodiments, the amino acid sequence of SEQ ID NO: 943 replaces position 577 (e.g., replaces T577), relative to a reference sequence numbered according to SEQ ID NO: 138. In some embodiments, the amino acid sequence of SEQ ID NO: 943 is present immediately subsequent to position 576, wherein the amino acid sequence of SEQ ID NO: 943 replaces position 577 (e.g., replaces T577), relative to a reference sequence numbered according to SEQ ID NO: 138.

[0026] In yet another aspect, the present disclosure provides an AAV capsid variant (e.g., an AAV5 capsid variant) comprising YPAEVVQK (SEQ ID NO: 943), which is present immediately subsequent to position 576, numbered relative to SEQ ID NO: 138 or 982. In some embodiments, the amino acid sequence of YPAEVVQK (SEQ ID NO: 943) replaces position 577 (e.g., replaces T577), numbered relative to SEQ ID NO: 138.

[0027] In yet another aspect, the present disclosure provides an AAV capsid variant (e.g., an AAV5 capsid variant) comprising YPAEVVQK (SEQ ID NO: 943), wherein YPAEVVQK (SEQ ID NO: 943) replaces position 577 (e.g., replaces T577), numbered relative to SEQ ID NO: 138.

[0028] In yet another aspect, the present disclosure provides an AAV capsid variant (e.g., an AAV5 capsid variant) comprising YPAEVVQK (SEQ ID NO: 943), which is present immediately subsequent to position 576, numbered relative to SEQ ID NO: 138, and wherein YPAEVVQK (SEQ ID NO: 943) replaces position 577 (e.g., replaces T577), numbered relative to SEQ ID NO: 138.

[0029] In yet another aspect, the present disclosure provides an AAV capsid variant (e.g., an AAV5 capsid variant) which comprises the amino acid Y at position 577, and further comprises the amino acid sequence of PAEVVQK (SEQ ID NO: 20), which is present immediately subsequent to position 577, numbered relative to SEQ ID NO: 138.

[0030] In yet another aspect, the present disclosure provides an AAV capsid variant (e.g., an AAV5 capsid variant) which comprises the amino acid Y at position 577, and comprises the amino acid sequence of PAEVVQK (SEQ ID NO: 20), which is present immediately subsequent to position 577, numbered relative to SEQ ID NO: 982. In some embodiments, the AAV capsid variant further comprises the amino acid sequence of SEQ ID NO: 739, or an amino acid sequence at least 95% (e.g., at least 96, 97, 98, or 99%) identical thereto. In some embodiments, the AAV capsid variant further comprises the amino acid sequence of SEQ ID NO: 738, or an amino acid sequence at least 95% (e.g., at least 96, 97, 98, or 99%) identical thereto. In some embodiments, the AAV capsid variant further comprises the amino acid sequence of SEQ ID NO: 982, or an amino acid sequence at least 95% (e.g., at least 96, 97, 98, or 99%) identical thereto.

[0031] In yet another aspect, the present disclosure provides an AAV capsid variant (e.g., an AAV5 capsid variant) comprising the amino acid Y at position 577 and the amino acid sequence of PAEVVQK (SEQ ID NO: 20) at positions 578-584, numbered relative to SEQ ID NO: 982. In some embodiments, the AAV capsid variant further comprises the amino acid sequence of SEQ ID NO: 739, or an amino acid sequence at least 95% (e.g., at least 96, 97, 98, or 99%) identical thereto. In some embodiments, the AAV capsid variant further comprises the amino acid sequence of SEQ ID NO: 738, or an amino acid sequence at least 95% (e.g., at least 96, 97, 98, or 99%) identical thereto. In some embodiments, the AAV capsid variant further comprises the amino acid sequence of SEQ ID NO: 982, or an amino acid sequence at least 95% (e.g., at least 96, 97, 98, or 99%) identical thereto.

[0032] In yet another aspect, the present disclosure provides an AAV capsid variant (e.g., an AAV5 capsid variant) comprising TNNQSSYPAEVVQKTA (SEQ ID NO: 1533), which is present immediately subsequent to position 570, numbered relative to SEQ ID NO: 138 or 982. In some embodiments, the amino acid sequence of YPAEVVQK (SEQ ID NO: 943), replaces position 577 (e.g., replaces T577) numbered relative to SEQ ID NO: 138.

[0033] In yet another aspect, the present disclosure provides an AAV capsid variant (e.g., an AAV5 capsid variant) comprising TNNQSSYPAEVVQKTA (SEQ ID NO: 1533), wherein YPAEVVQK (SEQ ID NO: 943) replaces position 577 (e.g., replaces T577), numbered relative to SEQ ID NO: 138.

[0034] In yet another aspect, the present disclosure provides an AAV capsid variant (e.g., an AAV5 capsid variant) comprising TNNQSSYPAEVVQKTA (SEQ ID NO: 1533), which is present immediately subsequent to position 570, numbered relative to SEQ ID NO: 138, wherein YPAEVVQK (SEQ ID NO: 943) replaces position 577 (e.g., replaces T577), numbered relative to SEQ ID NO: 138.

[0035] In yet another aspect, the present disclosure provides an AAV capsid variant (e.g., an AAV5 capsid variant) comprising TNNQSSYPAEVVQKTA (SEQ ID NO: 1533), which is present at positions 571-586, numbered according to SEQ ID NO: 982.

[0036] In another aspect, the present disclosure provides an AAV capsid variant (e.g., an AAV5 capsid variant) comprising the amino acid sequence of SEQ ID NO: 982. In another aspect, the present disclosure provides an AAV capsid variant that consists of the amino acid sequence of SEQ ID NO: 982.

[0037] In yet another aspect, the present disclosure provides an AAV capsid variant (e.g., an AAV5 capsid variant) comprising an amino acid sequence encoded by the nucleotide sequence of SEQ ID NO: 984. In another aspect, the present disclosure provides an AAV capsid variant comprising an amino acid sequence encoded by a nucleotide sequence having at least 95% identity to SEQ ID NO: 984.

[0038] In yet another aspect, the present disclosure provides an AAV capsid variant (e.g., an AAV5 capsid variant) comprising an amino acid sequence at least 90%, 95%, 96%, 97%, 98%, or 99% identical to the amino acid sequence of positions 193-731 of SEQ ID NO: 982, wherein the AAV capsid variant comprises the amino acid sequence of YPAEVVQK (SEQ ID NO: 943). In some embodiments, the AAV capsid variant comprises the amino acid sequence of positions 193-731 of SEQ ID NO: 982.

[0039] In yet another aspect, the present disclosure provides an AAV capsid variant (e.g., an AAV5 capsid variant) comprising an amino acid sequence at least 90%, 95%, 96%, 97%, 98%, or 99% identical to the amino acid sequence of SEQ ID NO: 739, wherein the AAV capsid variant comprises the amino acid sequence of YPAEVVQK (SEQ ID NO: 943). In some embodiments, the AAV capsid variant comprises the amino acid sequence of SEQ ID NO: 739.

[0040] In yet another aspect, the present disclosure provides a peptide comprising: (a) the amino acid sequence of any of the sequences provided in Tables 1, 2A, 2B, 9, or 15-20; (b) an amino acid sequence comprising at least 3, 4, 5, 6, 7, 8, 9, 10, 11, 12, 13, 14, or 15 consecutive amino acids from any one of the sequences provided in Tables 1, 2A, 2B, 9, or 15-20; or (c) an amino acid sequence comprising one, two, or three but no more than four different amino acids, relative to the amino acid sequence of any one of the amino acid sequences provided in Tables 1, 2A, 2B, 9, or 15-20; or (d) an amino sequence comprising one, two, or three but no more than four modifications, e.g., substitutions (e.g., conservative substitutions), insertions, or deletions, relative to the amino acid sequence of any one of the amino acid sequences provided in Tables 1, 2A, 2B, 9, or 15-20.

[0041] In yet another aspect, the present disclosure provides a peptide comprising the amino acid sequence of YPAEVVQK (SEQ ID NO: 943). In yet another aspect, the present disclosure provides a peptide comprising (i) an amino acid sequence comprising one, two, or three, but no more than four different amino acids relative to the amino acid sequence of YPAEVVQK (SEQ ID NO: 943); (ii) an amino acid sequence comprising one, two, or three modifications, e.g., substitutions (e.g., conservative substitutions), but no more than four modifications, e.g., substitutions (e.g., conservative substitutions), relative to the amino acid sequence of YPAEVVQK (SEQ ID NO: 943); or (iii) at least 3, 4, 5, 6, or 7 consecutive amino acids from the amino acid sequence of YPAEVVQK (SEQ ID NO: 943).

[0042] In yet another aspect, the present disclosure provides a peptide encoded by the nucleotide sequence of SEQ ID NO: 944, or a nucleotide sequence substantially identical (e.g., having at least 70%, 75%, 80%, 85%, 90%, 92%, 95%, 97%, 98%, or 99% sequence identity) thereto. In yet another aspect, the present disclosure provides a peptide encoded by (i) a nucleotide sequence comprising one, two, three, four, five, six, or seven, but no more than ten different nucleotides, relative to the nucleotide sequence of SEQ ID NO: 944; or (ii) a nucleotide sequence comprising one, two, three, four, five, six, or seven modifications, e.g., substitutions, insertions or deletions, but no more than ten modifications, e.g., substitutions, insertions or deletions, relative to the nucleotide sequence of SEQ ID NO: 944.

[0043] In yet another aspect, the present disclosure provides a peptide, wherein the nucleotide sequence encoding the peptide comprises (i) the nucleotide sequence of SEQ ID NO: 944, or a nucleotide sequence substantially identical (e.g., having at least 70%, 75%, 80%, 85%, 90%, 92%, 95%, 97%, 98%, or 99% sequence identity) thereto; (ii) a nucleotide sequence comprising one, two, three, four, five, six, or seven, but no more than ten different nucleotides relative to the nucleotide sequence of SEQ ID NO: 944; or (iii) a nucleotide sequence comprising one, two, three, four, five, six, or seven modifications, e.g., substitutions, insertions or deletions, but no more than ten modifications, e.g., substitutions, insertions or deletions, relative to the nucleotide sequence of SEQ ID NO: 944.

[0044] In another aspect, the present disclosure provides a polynucleotide encoding an AAV capsid variant (e.g., an AAV5 capsid variant), wherein the encoded AAV capsid variant comprises: (a) the amino acid sequence of any of the sequences provided in Tables 1, 2A, 2B, 9, or 15-20; (b) an amino acid sequence comprising at least 3, 4, 5, 6, 7, 8, 9, 10, 11, 12, 13, 14, or 15 consecutive amino acids from any one of the sequences provided in Tables 1, 2A, 2B, 9, or 15-20; or (c) an amino acid sequence comprising one, two, or three but no more than four different amino acids, relative to the amino acid sequence of any one of the amino acid sequences provided in Tables 1, 2A, 2B, 9, or 15-20; or (d) an amino sequence comprising one, two, or three but no more than four modifications, e.g., substitutions (e.g., conservative substitutions), insertions, or deletions, relative to the amino acid sequence of any one of the amino acid sequences provided in Tables 1, 2A, 2B, 9, or 15-20.

[0045] In yet another aspect, the present disclosure provides a polynucleotide encoding an AAV capsid variant (e.g., an AAV5 capsid variant), wherein the encoded AAV capsid variant comprises the amino acid sequence of YPAEVVQK (SEQ ID NO: 943). In yet another aspect, the present disclosure provides a polynucleotide encoding an AAV capsid variant, wherein the encoded AAV capsid variant comprises (i) an amino acid sequence comprising one, two, or three, but no more than four different amino acids relative to the amino acid sequence of YPAEVVQK (SEQ ID NO: 943); (ii) an amino acid sequence comprising one, two, or three modifications, e.g., substitutions (e.g., conservative substitutions), but no more than four modifications, e.g., substitutions (e.g., conservative substitutions), relative to the amino acid sequence of YPAEVVQK (SEQ ID NO: 943); or (iii) at least 3, 4, 5, 6, or 7 consecutive amino acids from the amino acid sequence of YPAEVVQK (SEQ ID NO: 943).

[0046] In yet another aspect, the present disclosure provides an AAV particle comprising an AAV capsid polypeptide, e.g., an AAV capsid variant (e.g., an AAV5 capsid variant), described herein. In some embodiments, the AAV particle comprises a nucleic acid sequence encoding a payload. In some embodiments, the AAV particle further comprises a viral genome comprising a promoter operably linked to the nucleic acid sequence encoding the payload.

[0047] In yet another aspect, the present disclosure provides a method of making an AAV particle comprising an AAV capsid polypeptide, e.g., an AAV capsid variant (e.g., an AAV5 capsid variant), described herein. In some embodiments, the method comprises providing a host cell comprising a viral genome and incubating the host cell under conditions suitable to enclose the viral genome in the AAV capsid variant, e.g., an AAV capsid variant described herein, thereby making the AAV particle.

[0048] In yet another aspect, the present disclosure provides a method of delivering a payload to a cell or tissue (e.g., a CNS cell, a CNS tissue, a muscle cell, or a muscle tissue). The method comprising administering an effective amount of an AAV particle comprising an AAV capsid variant described herein (e.g., an AAV5 capsid variant).

[0049] In yet another aspect, the present disclosure provides a method of treating a subject having or diagnosed with having a genetic disorder e.g., a monogenic disorder or a polygenic disorder. The method comprising administering an effective amount of an AAV particle comprising an AAV capsid variant described herein (e.g., an AAV5 capsid variant).

[0050] In yet another aspect, the present disclosure provides a method of treating a subject having or diagnosed with having a neurological, e.g., a neurodegenerative, disorder. The method comprising administering an effective amount of an AAV particle comprising an AAV capsid variant described herein (e.g., an AAV5 capsid variant).

[0051] In yet another aspect, the present disclosure provides a method of treating a subject having or diagnosed with having a muscular disorder or a neuromuscular disorder. The method comprising administering an effective amount of an AAV particle comprising an AAV capsid variant described herein (e.g., an AAV5 capsid variant).

[0052] In yet another aspect, the present disclosure provides a method of treating a subject having or diagnosed with having a cardiac disorder, e.g., a cardiac disorder as described herein (e.g., a cardiomyopathy (e.g., arrhythmogenic right ventricular cardiomyopathy, dilated cardiomyopathy, or hypertrophic cardiomyopathy), congestive heart failure, tachycardia (e.g., catecholaminergic polymorphic ventricular tachycardia), ischemic heart disease, and/or myocardial infarction). The method comprising administering an effective amount of an AAV particle comprising an AAV capsid variant described herein (e.g., an AAV5 capsid variant).

[0053] In yet another aspect, the present disclosure provides a method of treating a subject having or diagnosed with having a neuro-oncological disorder. The method comprising administering an effective amount of an AAV particle comprising an AAV capsid variant described herein (e.g., an AAV5 capsid variant).

[0054] Those skilled in the art will recognize or be able to ascertain using no more than routine experimentation, many equivalents to the specific embodiments of the invention described herein. Such equivalents are intended to be encompassed by the following enumerated embodiments.

### Enumerated Embodiments

[0055] 1. An AAV capsid variant (e.g., an AAV5 capsid variant), comprising an amino sequence comprising the following formula:
[0056] [N2]-[N3], wherein:
   [0057] (i) [N2] comprises positions X1, X2, X3, X4, and X5, wherein:
      [0058] (a) position X1 is Y, N, C, or T;
      [0059] (b) position X2 is P, E, K, T, or Q;
      [0060] (c) position X3 is A or P;
      [0061] (d) position X4 is E, S, D, or A; and
      [0062] (e) position X5 is V, L, or E; and
   [0063] (ii) [N3] comprises the amino acid sequence of VQK, VQN, EQK, VKK, VHK, VQQ, or LQK; or
   [0064] wherein the AAV capsid variant comprises an amino acid modification, e.g., a conservative substitution, of any of the aforesaid amino acids in (i) and/or (ii).
[0065] 2. An AAV capsid variant (e.g., an AAV5 capsid variant), comprising an amino sequence comprising the following formula:
[0066] [N2]-[N3], wherein:
   [0067] (i) [N2] comprises positions X1, X2, X3, X4, and X5, wherein:
      [0068] (a) position X1 is Y, N, or C;
      [0069] (b) position X2 is P, K, T, or Q;
      [0070] (c) position X3 is A or P;
      [0071] (d) position X4 is E, S, or A; and
      [0072] (e) position X5 is V, L, or E; and
   [0073] (ii) [N3] comprises the amino acid sequence of VQK, EQK, VKK, VHK, VQQ, or LQK; or wherein the AAV capsid variant comprises an amino acid modification, e.g., a conservative substitution, of any of the aforesaid amino acids in (i) and/or (ii).
[0074] 3. An AAV capsid variant (e.g., an AAV5 capsid variant) comprising one, two, three, four, or all of:
   [0075] (i) an [N0] comprising TNN, TNT, INN, TNS, NNN, or TNK;
   [0076] (ii) an [N1] comprising QSS, QSK, TSL, SSS, QSR, AGA, IGS, QAS, ASS, LGS, QST, HSS, LSS, or QRS;

(iii) an [N2] comprising
(SEQ ID NO: 1)
YPAEV,
(SEQ ID NO: 2)
YPPSL,
(SEQ ID NO: 3)
NKAEV,
(SEQ ID NO: 4)
YTAEV,
(SEQ ID NO: 5)
YPAEE,
(SEQ ID NO: 6)
YQAEV,
(SEQ ID NO: 7)
YTPSL,
(SEQ ID NO: 8)
YPAAV,
(SEQ ID NO: 9)
NPAEV,
(SEQ ID NO: 10)
CPAEV,
or
(SEQ ID NO: 11)
YQAEE;

[0077] (iv) an [N3] comprising VQK, EQK, VKK, VHK, VQQ, or LQK; and
   [0078] (v) an [N4] comprising TA, PA, or NA; and
   [0079] optionally wherein the AAV capsid variant comprises an amino acid modification, e.g., a conservative substitution, of any of the aforesaid amino acids in (i)-(v).
[0080] 4. The AAV capsid variant of embodiment 1 or 2, wherein:
   [0081] (a) position X1 is Y or N;
   [0082] (b) position X2 is P, T or Q;
   [0083] (c) position X3 is A;
   [0084] (d) position X4 is E or S; and/or
   [0085] (e) position X5 is V or L.
[0086] 5. The AAV capsid variant of any one of embodiments 1, 2, or 4, wherein [N2] comprises YP, NK, YT, YQ, NP, CP, TH, AE, PS, AA, AS, PA, PP, KA, TA, QA, TP, HA, EV, SL, EE, AV, or SH.
[0087] 6. The AAV capsid variant of any one of embodiments 1, 2, 4, or 5, wherein [N2] comprises YPA, YPP, NKA, YTA, YQA, YTP, NPA, CPA, THA, PAE, PPS, KAE, TAE, QAE, TPS, PAA, HAS, AEV, PSL, AEE, or AAV.
[0088] 7. The AAV capsid variant of any one of embodiments 1-2 or 4-6, wherein [N2] comprises YPAE (SEQ ID NO: 21), YPPS (SEQ ID NO: 22), NKAE (SEQ ID NO: 23), YTAE (SEQ ID NO: 24), YQAE (SEQ ID NO: 25), YTPS (SEQ ID NO: 26), YPAA (SEQ ID NO: 27), NPAE (SEQ ID NO: 28), CPAE (SEQ ID NO: 29), THAS (SEQ ID NO: 30), PAEV (SEQ ID NO: 17), PPSL (SEQ ID NO: 31), KAEV (SEQ ID NO: 32), TAEV (SEQ ID NO: 16), PAEE (SEQ ID NO: 18), QAEV (SEQ ID NO: 15), TPSL (SEQ ID NO: 33), PAAV (SEQ ID NO: 34), or QAEE (SEQ ID NO: 35).
[0089] 8. The AAV capsid variant of any one of embodiments 1-7, wherein [N2] is or comprises YPAEV (SEQ ID NO: 1), YPPSL (SEQ ID NO: 2), NKAEV (SEQ ID NO: 3), YTAEV (SEQ ID NO: 4), YPAEE (SEQ ID NO: 5), YQAEV (SEQ ID NO: 6), YTPSL (SEQ ID NO: 7), YPAAV (SEQ ID NO: 8), NPAEV (SEQ ID NO: 9), CPAEV (SEQ ID NO: 10), or YQAEE (SEQ ID NO: 11).
[0090] 9. The AAV capsid variant of any one of embodiments 1-2 or 4-8, wherein [N3] comprises the amino acid sequence of VQK, EQK, or VKK.
[0091] 10. The AAV capsid variant of any one of embodiments 1-2 or 4-9, wherein [N3] comprises VQK.
[0092] 11. The AAV capsid variant of any one of embodiments 1-2 or 4-9, wherein [N3] comprises EQK.
[0093] 12. The AAV capsid variant of any one of embodiments 1-2 or 4-9, wherein [N3] comprises VKK 13. The AAV capsid variant of any one of embodiments 1-12, wherein [N2] is or comprises the amino acid sequence of YPAEV (SEQ ID NO: 1) and [N3] is or comprises the amino acid sequence of VQK.
[0094] 14. The AAV capsid variant of any one of embodiments 1-12, wherein:
   [0095] (i) [N2] is or comprises the amino acid sequence of YTPSL (SEQ ID NO: 7) and [N3] is or comprises the amino acid sequence of VQK;
   [0096] (ii) [N2] is or comprises the amino acid sequence of YPPSL (SEQ ID NO: 2) and [N3] is or comprises the amino acid sequence of VQK;
   [0097] (iii) [N2] is or comprises the amino acid sequence of YPPS (SEQ ID NO: 2) L and [N3] is or comprises the amino acid sequence of EQK; or
   [0098] (iv) [N2] is or comprises the amino acid sequence of YPPSL (SEQ ID NO: 2) and [N3] is or comprises the amino acid sequence of VKK.
[0099] 15. The AAV capsid variant of any one of embodiments 1-2 or 4-14, wherein [N2]-[N3] comprises:

(i)
(SEQ ID NO: 36)
AEVVQK,
(SEQ ID NO: 37)
PSLVQK,
(SEQ ID NO: 38)
AEVEQK,
(SEQ ID NO: 39)
AEEVQK,
(SEQ ID NO: 40)
PSLEQK,
(SEQ ID NO: 41)
PSLVKK,
(SEQ ID NO: 42)
AEVVKK,
(SEQ ID NO: 43)
AEVVHK,
(SEQ ID NO: 44)
AAVVQK,
(SEQ ID NO: 45)
AEVVQQ,
or
(SEQ ID NO: 46)
AEVLQK;

[0100] (ii) an amino acid sequence comprising any portion of an amino acid sequence in (i), e.g., any 2, 3, 4, or 5 amino acids, e.g., consecutive amino acids, thereof;
[0101] (iii) an amino acid sequence comprising one, two, or three but no more than four modifications, e.g., substitutions (e.g., conservative substitutions), insertions, or deletions, relative to any of the amino acid sequences in (i); or
[0102] (iv) an amino acid sequence comprising one, two, or three but no more than four different amino acids, relative to any one of the amino acid sequences in (i).
[0103] 16. The AAV capsid variant of any one of embodiments 1-2 or 4-15, wherein [N2]-[N3] comprises:

(i)
(SEQ ID NO: 20)
PAEVVQK,
(SEQ ID NO: 47)
PPSLVQK,
(SEQ ID NO: 48)
KAEVVQK,
(SEQ ID NO: 49)
TAEVVQK,
(SEQ ID NO: 50)
PAEVEQK,
(SEQ ID NO: 51)
PAEEVQK,
(SEQ ID NO: 52)
QAEVVQK,
(SEQ ID NO: 53)
TPSLVQK,
(SEQ ID NO: 54)
PPSLEQK,
(SEQ ID NO: 55)
PPSLVKK,
(SEQ ID NO: 56)
PAEVVKK,
(SEQ ID NO: 57)
PAEVVHK,
(SEQ ID NO: 58)
PAAVVQK,
(SEQ ID NO: 59)
PAEVVQQ,
(SEQ ID NO: 60)
TAEVVKK,
(SEQ ID NO: 61)
PAEVLQK,
or
(SEQ ID NO: 62)
QAEEVQK;

[0104] (ii) an amino acid sequence comprising any portion of an amino acid sequence in (i), e.g., any 2, 3, 4, 5, or 6 amino acids, e.g., consecutive amino acids, thereof;
[0105] (iii) an amino acid sequence comprising one, two, or three but no more than four modifications, e.g., substitutions (e.g., conservative substitutions), insertions, or deletions, relative to any of the amino acid sequences in (i); or
[0106] (iv) an amino acid sequence comprising one, two, or three but no more than four different amino acids, relative to any one of the amino acid sequences in (i).
[0107] 17. The AAV capsid variant of any one of embodiments 1-16, wherein [N2]-[N3] is or comprises:

(i)
(SEQ ID NO: 943)
YPAEVVQK,
(SEQ ID NO: 946)
YPPSLVQK,
(SEQ ID NO: 947)
NKAEVVQK,
(SEQ ID NO: 948)
YTAEVVQK,
(SEQ ID NO: 949)
YPAEVEQK,
(SEQ ID NO: 950)
YPAEEVQK,
(SEQ ID NO: 951)
YQAEVVQK,
(SEQ ID NO: 952)
YTPSLVQK,
(SEQ ID NO: 953)
YPPSLEQK,
(SEQ ID NO: 954)
YPPSLVKK,
(SEQ ID NO: 955)
YPAEVVKK,
(SEQ ID NO: 956)
YPAEVVHK,
(SEQ ID NO: 957)
YPAAVVQK,
(SEQ ID NO: 958)
NPAEVVQK,
(SEQ ID NO: 959)
YPAEVVQQ,
(SEQ ID NO: 960)
CPAEVVQK,
(SEQ ID NO: 961)
YTAEVVKK,
(SEQ ID NO: 962)
YPAEVLQK,
or
(SEQ ID NO: 963)
YQAEEVQK;

[0108] (ii) an amino acid sequence comprising any portion of an amino acid sequence in (i), e.g., any 2, 3, 4, 5, 6, or 7 amino acids, e.g., consecutive amino acids, thereof;
[0109] (iii) an amino acid sequence comprising one, two, or three but no more than four modifications, e.g., substitutions (e.g., conservative substitutions), insertions, or deletions, relative to any of the amino acid sequences in (i); or
[0110] (iv) an amino acid sequence comprising one, two, or three but no more than four different amino acids, relative to any one of the amino acid sequences in (i).
[0111] 18. The AAV capsid variant of any one of embodiments 1-17, which further comprises one, two, three or all of an amino acid other than Q at position 574 (e.g., T, S, A, I, L, or H), an amino acid other than S at position 575 (e.g., G, A, or R), and/or an amino acid other than S at position 576 (e.g., K, L, R, A, or T), relative to a reference sequence numbered according to the amino acid sequence of SEQ ID NO: 138 or 982.
[0112] 19. The AAV capsid variant of any one of embodiments 1-17, which further comprises:
   [0113] (i) a Q at position 574, an S at position 575, and/or an S at position 576, relative to a reference sequence numbered according to the amino acid sequence of SEQ ID NO: 138 or 982;
   [0114] (ii) a T at position 574, an S at position 575, and/or a L at position 576, relative to a reference sequence numbered according to the amino acid sequence of SEQ ID NO: 138 or 982;
   [0115] (iii) an S at position 574, an S at position 575, and/or an S at position 576, relative to a reference sequence numbered according to the amino acid sequence of SEQ ID NO: 138 or 982;
   [0116] (iv) a Q at position 574, an S at position 575, and/or an R at position 576, relative to a reference sequence numbered according to the amino acid sequence of SEQ ID NO: 138 or 982;
   [0117] (v) a Q at position 574, an S at position 575, and/or a K at position 576, relative to a reference sequence numbered according to the amino acid sequence of SEQ ID NO: 138 or 982;
   [0118] (vi) an A at position 574, a G at position 575, and/or an A at position 576, relative to a reference sequence numbered according to the amino acid sequence of SEQ ID NO: 138 or 982;
   [0119] (vii) an I at position 574, a G at position 575, and/or an S at position 576, relative to a reference sequence numbered according to the amino acid sequence of SEQ ID NO: 138 or 982;
   [0120] (viii) a Q at position 574, an A at position 575, and/or an S at position 576, relative to a reference sequence numbered according to the amino acid sequence of SEQ ID NO: 138 or 982;
   [0121] (ix) an A at position 574, an S at position 575, and/or an S at position 576, relative to a reference sequence numbered according to the amino acid sequence of SEQ ID NO: 138 or 982;
   [0122] (x) an L at position 574, a G at position 575, and/or an S at position 576, relative to a reference sequence numbered according to the amino acid sequence of SEQ ID NO: 138 or 982;
   [0123] (xi) a Q at position 574, an S at position 575, and/or a T at position 576, relative to a reference sequence numbered according to the amino acid sequence of SEQ ID NO: 138 or 982;
   [0124] (xii) an H at position 574, an S at position 575, and/or an S at position 576, relative to a reference sequence numbered according to the amino acid sequence of SEQ ID NO: 138 or 982;
   [0125] (xiii) an L at position 574, an S at position 575, and/or an S at position 576, relative to a reference sequence numbered according to the amino acid sequence of SEQ ID NO: 138 or 982; or (xiv) a Q at position 574, an R at position 575, and/or an S at position 576, relative to a reference sequence numbered according to the amino acid sequence of SEQ ID NO: 138 or 982.
[0126] 20. The AAV capsid variant of any one of embodiments 1-19, which further comprises [N1], wherein [N1] comprises positions X_{D}, X_{E}, and X_{F}, wherein:
   [0127] (a) position X_{D} is Q, T, S, A, I, L, or H;
   [0128] (b) position X_{E} is S, G, A, or R; and
   [0129] (c) position X_{F} is S, K, L, R, A, or T; and optionally wherein the AAV capsid variant comprises an amino acid modification, e.g., a conservative substitution, of any of the aforesaid amino acids in (a)-(c).
[0130] 21. The AAV capsid variant of embodiment 20, wherein [N1] comprises SK, SL, SS, SR, GA, GS, AS, ST, RS, QS, TS, AG, IG, QA, LG, HS, LS, or QR.
[0131] 22. The AAV capsid variant of any one of embodiments 3, 20, or 21, wherein [N1] is or comprises QSS, QSK, TSL, SSS, QSR, AGA, IGS, QAS, ASS, LGS, QST, HSS, LSS, or QRS.
[0132] 23. The AAV capsid variant of any one of embodiments 20-22, wherein [N1]-[N2] comprises:

(i)
(SEQ ID NO: 63)
SSYPA,
(SEQ ID NO: 64)
SKYPA,
(SEQ ID NO: 65)
SLYPA,
(SEQ ID NO: 66)
SRYPA,
(SEQ ID NO: 67)
SSYPP,
(SEQ ID NO: 68)
GAYPA,
(SEQ ID NO: 69)
GSYPA,
(SEQ ID NO: 70)
ASYPA,
(SEQ ID NO: 71)
STNKA,
(SEQ ID NO: 72)
SSYTA,
(SEQ ID NO: 73)
SSYQA,
(SEQ ID NO: 74)
SSYTP,
(SEQ ID NO: 75)
SSNPA,
(SEQ ID NO: 76)
SLCPA,
(SEQ ID NO: 77)
RSYTA,
or
(SEQ ID NO: 78)
SSTHA;

[0133] (ii) an amino acid sequence comprising any portion of an amino acid sequence in (i), e.g., any 2, 3, or 4 amino acids, e.g., consecutive amino acids, thereof;
[0134] (iii) an amino acid sequence comprising one, two, or three but no more than four modifications, e.g., substitutions (e.g., conservative substitutions), insertions, or deletions, relative to any of the amino acid sequences in (i); or
[0135] (iv) an amino acid sequence comprising one, two, or three but no more than four different amino acids, relative to any one of the amino acid sequences in (i).
[0136] 24. The AAV capsid variant of any one of embodiments 20-23, wherein [N1]-[N2] comprises:

(i)
(SEQ ID NO: 79)
SSYPAE,
(SEQ ID NO: 80)
SKYPAE,
(SEQ ID NO: 81)
SLYPAE,
(SEQ ID NO: 82)
SRYPAE,
(SEQ ID NO: 83)
SSYPPS,
(SEQ ID NO: 84)
GAYPAE,
(SEQ ID NO: 85)
GSYPAE,
(SEQ ID NO: 86)
ASYPAE,
(SEQ ID NO: 87)
STNKAE,
(SEQ ID NO: 88)
SSYTAE,
(SEQ ID NO: 89)
SSYQAE,
(SEQ ID NO: 90)
SSYTPS,
(SEQ ID NO: 91)
SSYPAA,
(SEQ ID NO: 92)
SSNPAE,
(SEQ ID NO: 93)
SLCPAE,
(SEQ ID NO: 94)
RSYTAE,
(SEQ ID NO: 95)
SSTHAS;

[0137] (ii) an amino acid sequence comprising any portion of an amino acid sequence in (i), e.g., any 2, 3, 4, or 5 amino acids, e.g., consecutive amino acids, thereof;
[0138] (iii) an amino acid sequence comprising one, two, or three but no more than four modifications, e.g., substitutions (e.g., conservative substitutions), insertions, or deletions, relative to any of the amino acid sequences in (i); or
[0139] (iv) an amino acid sequence comprising one, two, or three but no more than four different amino acids, relative to any one of the amino acid sequences in (i).
[0140] 25. The AAV capsid variant of any one of embodiments 3 or 20-24, wherein [N1]-[N2] is or comprises:

(i)
(SEQ ID NO: 96)
QSSYPAEV,
(SEQ ID NO: 97)
QSKYPAEV,
(SEQ ID NO: 98)
TSLYPAEV,
(SEQ ID NO: 99)
SSSYPAEV,
(SEQ ID NO: 100)
QSRYPAEV,
(SEQ ID NO: 101)
QSSYPPSL,
(SEQ ID NO: 102)
AGAYPAEV,
(SEQ ID NO: 103)
IGSYPAEV,
(SEQ ID NO: 104)
QASYPAEV,
(SEQ ID NO: 105)
ASSYPAEV,
(SEQ ID NO: 106)
LGSYPAEV,
(SEQ ID NO: 107)
QSTNKAEV,
(SEQ ID NO: 108)
HSSYPAEV,
(SEQ ID NO: 109)
SSSYTAEV,
(SEQ ID NO: 110)
TSLYPAEE,
(SEQ ID NO: 111)
ASSYQAEV,
(SEQ ID NO: 112)
QSSYTPSL,
(SEQ ID NO: 113)
QSRYPAEE,
(SEQ ID NO: 114)
LSSYQAEV,
(SEQ ID NO: 115)
HSSYPAAV,
(SEQ ID NO: 116)
QSSNPAEV,
(SEQ ID NO: 117)
QSSYTAEV,
(SEQ ID NO: 118)
TSLCPAEV,
(SEQ ID NO: 119)
QRSYTAEV,
or
(SEQ ID NO: 120)
QSSYQAEE;

[0141] (ii) an amino acid sequence comprising any portion of an amino acid sequence in (i), e.g., any 2, 3, 4, 5, 6, or 7 amino acids, e.g., consecutive amino acids, thereof;
[0142] (iii) an amino acid sequence comprising one, two, or three but no more than four modifications, e.g., substitutions (e.g., conservative substitutions), insertions, or deletions, relative to any of the amino acid sequences in (i); or
[0143] (iv) an amino acid sequence comprising one, two, or three but no more than four different amino acids, relative to any one of the amino acid sequences in (i).
[0144] 26. The AAV capsid variant of any one of embodiments 20-25, wherein [N1]-[N2]-[N3] comprises:

(i)
(SEQ ID NO: 121)
SSYPAEVVQ,
(SEQ ID NO: 122)
SKYPAEVVQ,
(SEQ ID NO: 123)
SLYPAEVVQ,
(SEQ ID NO: 124)
SRYPAEVVQ,
(SEQ ID NO: 125)
SSYPPSLVQ,
(SEQ ID NO: 126)
GAYPAEVVQ,
(SEQ ID NO: 127)
GSYPAEVVQ,
(SEQ ID NO: 128)
ASYPAEVVQ,
(SEQ ID NO: 129)
STNKAEVVQ,
(SEQ ID NO: 130)
SSYTAEVVQ,
(SEQ ID NO: 131)
SKYPAEVEQ,
(SEQ ID NO: 132)
SLYPAEEVQ,
(SEQ ID NO: 133)
SSYQAEVVQ,
(SEQ ID NO: 134)
SSYTPSLVQ,
(SEQ ID NO: 135)
SRYPAEEVQ,
(SEQ ID NO: 136)
SSYPPSLEQ,
(SEQ ID NO: 140)
SSYPPSLVK,
(SEQ ID NO: 141)
SSYPAEVVK,
(SEQ ID NO: 142)
SKYPAEVVH,
(SEQ ID NO: 143)
SSYPAAVVQ,
(SEQ ID NO: 144)
SSNPAEVVQ,
(SEQ ID NO: 145)
SLCPAEVVQ,
(SEQ ID NO: 146)
RSYTAEVVQ,
(SEQ ID NO: 147)
SSYTAEVVK,
(SEQ ID NO: 148)
SSYPAEVLQ,
or
(SEQ ID NO: 149)
SSYQAEEVQ;

[0145] (ii) an amino acid sequence comprising any portion of an amino acid sequence in (i), e.g., any 2, 3, 4, 5, 6, 7, or 8 amino acids, e.g., consecutive amino acids, thereof;
[0146] (iii) an amino acid sequence comprising one, two, or three but no more than four modifications, e.g., substitutions (e.g., conservative substitutions), insertions, or deletions, relative to any of the amino acid sequences in (i); or
[0147] (iv) an amino acid sequence comprising one, two, or three but no more than four different amino acids, relative to any one of the amino acid sequences in (i).
[0148] 27. The AAV capsid variant of any one of embodiments 3 or 20-26, wherein [N1]-[N2]-[N3] is or comprises:

(i)
(SEQ ID NO: 150)
QSSYPAEVVQK,
(SEQ ID NO: 151)
QSKYPAEVVQK,
(SEQ ID NO: 152)
TSLYPAEVVQK,
(SEQ ID NO: 153)
SSSYPAEVVQK,
(SEQ ID NO: 154)
QSRYPAEVVQK,
(SEQ ID NO: 155)
QSSYPPSLVQK,
(SEQ ID NO: 156)
AGAYPAEVVQK,
(SEQ ID NO: 157)
IGSYPAEVVQK,
(SEQ ID NO: 158)
QASYPAEVVQK,
(SEQ ID NO: 159)
ASSYPAEVVQK,
(SEQ ID NO: 160)
LGSYPAEVVQK,
(SEQ ID NO: 161)
QSTNKAEVVQK,
(SEQ ID NO: 162)
HSSYPAEVVQK,
(SEQ ID NO: 163)
SSSYTAEVVQK,
(SEQ ID NO: 164)
QSKYPAEVEQK,
(SEQ ID NO: 165)
TSLYPAEEVQK,
(SEQ ID NO: 166)
ASSYQAEVVQK,
(SEQ ID NO: 167)
QSSYTPSLVQK,
(SEQ ID NO: 168)
QSRYPAEEVQK,
(SEQ ID NO: 169)
QSSYPPSLEQK,
(SEQ ID NO: 170)
QSSYPPSLVKK,
(SEQ ID NO: 171)
LSSYQAEVVQK,
(SEQ ID NO: 172)
SSSYPAEVVKK,
(SEQ ID NO: 173)
QSKYPAEVVHK,
(SEQ ID NO: 174)
HSSYPAAVVQK,
(SEQ ID NO: 175)
QSSNPAEVVQK,
(SEQ ID NO: 176)
SSSYPAEVVQQ,
(SEQ ID NO: 177)
QSSYTAEVVQK,
(SEQ ID NO: 178)
TSLCPAEVVQK,
(SEQ ID NO: 179)
QRSYTAEVVQK,
(SEQ ID NO: 180)
QSSYTAEVVKK,
(SEQ ID NO: 181)
HSSYPAEVLQK,
or
(SEQ ID NO: 182)
QSSYQAEEVQK;

[0149] (ii) an amino acid sequence comprising any portion of an amino acid sequence in (i), e.g., any 2, 3, 4, 5, 6, 7, 8, 9, or 10 amino acids, e.g., consecutive amino acids, thereof;
[0150] (iii) an amino acid sequence comprising one, two, or three but no more than four modifications, e.g., substitutions (e.g., conservative substitutions), insertions, or deletions, relative to any of the amino acid sequences in (i); or
[0151] (iv) an amino acid sequence comprising one, two, or three but no more than four different amino acids, relative to any one of the amino acid sequences in (i).
[0152] 28. The AAV capsid variant of any one of embodiments 1-27, which further comprises [N0], wherein [N0] comprises positions X_{A}, X_{B}, and X_{C}, wherein:
   [0153] (a) position X_{A} is T, I, or N;
   [0154] (b) position X_{B} is N;
   [0155] (c) position X_{C} is N, T, S, or K; and optionally, wherein the AAV capsid variant comprises an amino acid modification, e.g., a conservative substitution, of any of the aforesaid amino acids in (a)-(c).
[0156] 29. The AAV capsid variant of embodiment 28, wherein [N0] comprises TN, IN, NN, NT, NS, or NK.
[0157] 30. The AAV capsid variant of embodiment 3, 28, or 29, wherein [N0] is or comprises TNN, TNT, INN, TNS, NNN, or TNK.
[0158] 31. The AAV capsid variant of any one of embodiments 3 or 28-30, wherein [N0]-[N1] is or comprises:

(i)
(SEQ ID NO: 183)
TNNQSS,
(SEQ ID NO: 184)
TNNQSK,
(SEQ ID NO: 185)
TNNTSL,
(SEQ ID NO: 186)
TNNSSS,
(SEQ ID NO: 187)
TNNQSR,
(SEQ ID NO: 188)
TNNAGA,
(SEQ ID NO: 189)
TNNIGS,
(SEQ ID NO: 190)
TNNQAS,
(SEQ ID NO: 191)
TNTASS,
(SEQ ID NO: 192)
TNNLGS,
(SEQ ID NO: 193)
TNNQST,
(SEQ ID NO: 194)
TNNHSS,
(SEQ ID NO: 184)
TNNQSK,
(SEQ ID NO: 195)
TNNLSS,
(SEQ ID NO: 196)
INNQSS,
(SEQ ID NO: 197)
TNSQSS,
(SEQ ID NO: 198)
NNNQSR,
(SEQ ID NO: 199)
TNSTSL,
(SEQ ID NO: 200)
TNNQRS,
or
(SEQ ID NO: 201)
TNKQAS;

[0159] (ii) an amino acid sequence comprising any portion of an amino acid sequence in (i), e.g., any 2, 3, 4, or 5 amino acids, e.g., consecutive amino acids, thereof;
[0160] (iii) an amino acid sequence comprising one, two, or three but no more than four modifications, e.g., substitutions (e.g., conservative substitutions), insertions, or deletions, relative to any of the amino acid sequences in (i); or
[0161] (iv) an amino acid sequence comprising one, two, or three but no more than four different amino acids, relative to any one of the amino acid sequences in (i).
[0162] 32. The AAV capsid variant of any one of embodiments 3 or 28-31, wherein [N0]-[N1]-[N2]-[N3] is or comprises:

(i)
(SEQ ID NO: 500)
TNNQSSYPAEVVQK,
(SEQ ID NO: 503)
TNNQSKYPAEVVQK,
(SEQ ID NO: 506)
TNNTSLYPAEVVQK,
(SEQ ID NO: 508)
TNNSSSYPAEVVQK,
(SEQ ID NO: 510)
TNNQSRYPAEVVQK,
(SEQ ID NO: 512)
TNNQSSYPPSLVQK,
(SEQ ID NO: 513)
TNNAGAYPAEVVQK,
(SEQ ID NO: 514)
TNNIGSYPAEVVQK,
(SEQ ID NO: 517)
TNNQASYPAEVVQK,
(SEQ ID NO: 520)
TNTASSYPAEVVQK,
(SEQ ID NO: 523)
TNNLGSYPAEVVQK,
(SEQ ID NO: 524)
TNNQSTNKAEVVQK,
(SEQ ID NO: 525)
TNNHSSYPAEVVQK,
(SEQ ID NO: 526)
TNNSSSYTAEVVQK,
(SEQ ID NO: 529)
TNNQSKYPAEVEQK,
(SEQ ID NO: 530)
TNNTSLYPAEEVQK,
(SEQ ID NO: 531)
TNTASSYQAEVVQK,
(SEQ ID NO: 533)
TNNQSSYTPSLVQK,
(SEQ ID NO: 534)
TNNQSRYPAEEVQK,
(SEQ ID NO: 535)
TNNQSSYPPSLEQK,
(SEQ ID NO: 536)
TNNQSSYPPSLVKK,
(SEQ ID NO: 539)
TNNLSSYQAEVVQK,
(SEQ ID NO: 540)
TNNSSSYPAEVVKK,
(SEQ ID NO: 542)
TNNQSKYPAEVVHK,
(SEQ ID NO: 543)
INNQSSYPAEVVQK,
(SEQ ID NO: 545)
TNNHSSYPAAVVQK,
(SEQ ID NO: 548)
TNSQSSNPAEVVQK,
(SEQ ID NO: 551)
TNNSSSYPAEVVQQ,
(SEQ ID NO: 552)
NNNQSRYPAEVVQK,
(SEQ ID NO: 553)
TNNQSSYTAEVVQK,
(SEQ ID NO: 554)
TNNTSLCPAEVVQK,
(SEQ ID NO: 556)
TNSTSLYPAEVVQK,
(SEQ ID NO: 557)
TNNQRSYTAEVVQK,
(SEQ ID NO: 558)
TNNQSSYTAEVVKK,
(SEQ ID NO: 560)
TNNHSSYPAEVLQK,
(SEQ ID NO: 562)
TNNQSSYQAEEVQK,
or
(SEQ ID NO: 563)
TNKQASYPAEVVQK;

[0163] (ii) an amino acid sequence comprising any portion of an amino acid sequence in (i), e.g., any 2, 3, 4, 5, 6, 7, 8, 9, 10, 11, 12, or 13 amino acids, e.g., consecutive amino acids, thereof;
[0164] (iii) an amino acid sequence comprising one, two, or three but no more than four modifications, e.g., substitutions (e.g., conservative substitutions), insertions, or deletions, relative to any of the amino acid sequences in (i); or
[0165] (iv) an amino acid sequence comprising one, two, or three but no more than four different amino acids, relative to any one of the amino acid sequences in (i).
[0166] 33. The AAV capsid variant of embodiment 3 or 32, wherein [N0]-[N1]-[N2]-[N3] is or comprises

(SEQ ID NO: 500)
TNNQSSYPAEVVQK.

[0167] 34. The AAV capsid variant of embodiment 3 or 32, wherein [N0]-[N1]-[N2]-[N3] is or comprises

(SEQ ID NO: 513)
TNNAGAYPAEVVQK,
(SEQ ID NO: 506)
TNNTSLYPAEVVQK,
(SEQ ID NO: 503)
TNNQSKYPAEVVQK,
(SEQ ID NO: 533)
TNNQSSYTPSLVQK,
(SEQ ID NO: 512)
TNNQSSYPPSLVQK,
(SEQ ID NO: 510)
TNNQSRYPAEVVQK,
(SEQ ID NO: 535)
TNNQSSYPPSLEQK,
(SEQ ID NO: 536)
TNNQSSYPPSLVKK,
or
(SEQ ID NO: 543)
INNQSSYPAEVVQK.

[0168] 35. The AAV capsid variant of any one of embodiments 1-34, which further comprises [N4], wherein [N4] comprises positions X_{G} and X_{H}, wherein:
   [0169] (a) position X_{G} is T, P, or N; and
   [0170] (b) position X_{H} is A; and
   [0171] optionally wherein the AAV capsid variant comprises an amino acid modification, e.g., a conservative substitution, of any of the aforesaid amino acids in (a) or (b).
[0172] 36. The AAV capsid variant of embodiment 35, wherein [N4] is or comprises TA, PA, or NA.
[0173] 37. The AAV capsid variant of any one of embodiments 3, 35, or 36, wherein [N3]-[N4] is or comprises:

(i)
(SEQ ID NO: 564)
VQKTA,
(SEQ ID NO: 565)
EQKTA,
(SEQ ID NO: 566)
VKKTA,
(SEQ ID NO: 567)
VQKPA,
(SEQ ID NO: 568)
VHKTA,
(SEQ ID NO: 569)
VQQTA,
(SEQ ID NO: 570)
VQKNA,
or
(SEQ ID NO: 571)
LQKTA;

[0174] (ii) an amino acid sequence comprising any portion of an amino acid sequence in (i), e.g., any 2, 3, or 4 amino acids, e.g., consecutive amino acids, thereof;
[0175] (iii) an amino acid sequence comprising one, two, or three but no more than four modifications, e.g., substitutions (e.g., conservative substitutions), insertions, or deletions, relative to any of the amino acid sequences in (i); or
[0176] (iv) an amino acid sequence comprising one, two, or three but no more than four different amino acids, relative to any one of the amino acid sequences in (i).
[0177] 38. The AAV capsid variant of any one of embodiments 3 or 35-37, wherein [N0]-[N1]-[N2]-[N3]-[N4] is or comprises:

(i)
(SEQ ID NO: 1533)
TNNQSSYPAEVVQKTA,
(SEQ ID NO: 1538)
TNNQSKYPAEVVQKTA,
(SEQ ID NO: 1232)
TNNTSLYPAEVVQKTA,
(SEQ ID NO: 1539)
TNNSSSYPAEVVQKTA,
(SEQ ID NO: 1327)
TNNQSRYPAEVVQKTA,
(SEQ ID NO: 1300)
TNNQSSYPPSLVQKTA,
(SEQ ID NO: 1021)
TNNAGAYPAEVVQKTA,
(SEQ ID NO: 1112)
TNNIGSYPAEVVQKTA,
(SEQ ID NO: 1194)
TNNQASYPAEVVQKTA,
(SEQ ID NO: 1575)
TNTASSYPAEVVQKTA,
(SEQ ID NO: 1027)
TNNLGSYPAEVVQKTA,
(SEQ ID NO: 1578)
TNNQSTNKAEVVQKTA,
(SEQ ID NO: 1310)
TNNHSSYPAEVVQKTA,
(SEQ ID NO: 1538)
TNNQSKYPAEVVQKTA,
(SEQ ID NO: 1214)
TNNSSSYTAEVVQKTA,
(SEQ ID NO: 1254)
TNNQSKYPAEVEQKTA,
(SEQ ID NO: 1583)
TNNTSLYPAEEVQKTA,
(SEQ ID NO: 1584)
TNTASSYQAEVVQKTA,
(SEQ ID NO: 1585)
TNNQSSYTPSLVQKTA,
(SEQ ID NO: 1342)
TNNQSRYPAEEVQKTA,
(SEQ ID NO: 1590)
TNNQSSYPPSLEQKTA,
(SEQ ID NO: 1591)
TNNQSSYPPSLVKKTA,
(SEQ ID NO: 1592)
TNNLSSYQAEVVQKTA,
(SEQ ID NO: 1593)
TNNQSSYPPSLVQKPA,
(SEQ ID NO: 1331)
TNNSSSYPAEVVKKTA,
(SEQ ID NO: 1453)
TNNQSKYPAEVVHKTA,
(SEQ ID NO: 1142)
TNNSSSYPAEVVQKPA,
(SEQ ID NO: 1024)
INNQSSYPAEVVQKTA,
(SEQ ID NO: 1598)
TNNHSSYPAAVVQKTA,
(SEQ ID NO: 1599)
TNSQSSNPAEVVQKTA,
(SEQ ID NO: 1419)
TNNSSSYPAEVVQQTA,
(SEQ ID NO: 1601)
NNNQSRYPAEVVQKTA,
(SEQ ID NO: 1602)
TNNQSSYTAEVVQKNA,
(SEQ ID NO: 1603)
TNNTSLCPAEVVQKTA,
(SEQ ID NO: 1605)
TNSTSLYPAEVVQKTA,
(SEQ ID NO: 1604)
TNNQRSYTAEVVQKTA,
(SEQ ID NO: 1606)
TNNQSSYTAEVVKKTA,
(SEQ ID NO: 1607)
TNNHSSYPAEVLQKTA,
(SEQ ID NO: 1608)
TNNQSSYQAEEVQKTA,
or
(SEQ ID NO: 1587)
TNKQASYPAEVVQKTA;

[0178] (ii) an amino acid sequence comprising any portion of an amino acid sequence in (i), e.g., any 2, 3, 4, 5, 6, 7, 8, 9, 10, 11, 12, 13, 14, or 15 amino acids, e.g., consecutive amino acids, thereof;
[0179] (iii) an amino acid sequence comprising one, two, or three but no more than four modifications, e.g., substitutions (e.g., conservative substitutions), insertions, or deletions, relative to any of the amino acid sequences in (i); or
[0180] (iv) an amino acid sequence comprising one, two, or three but no more than four different amino acids, relative to any one of the amino acid sequences in (i).
[0181] 39. The AAV capsid variant of embodiment 3 or 35-38, wherein [N0]-[N1]-[N2]-[N3]-[N4] is or comprises TNNQSSYPAEVVQKTA (SEQ ID NO: 1533).
[0182] 40. The AAV capsid variant of embodiment 3 or 35-38, wherein [N0]-[N1]-[N2]-[N3]-[N4] is or comprises TNNAGAYPAEVVQKTA (SEQ ID NO: 1021), TNNTSLYPAEVVQKTA (SEQ ID NO: 1232), TNNQSKYPAEVVQKTA (SEQ ID NO: 1538), TNNQSSYTPSLVQKTA (SEQ ID NO: 1585), TNNQSSYPPSLVQKTA (SEQ ID NO: 1300), TNNQSRYPAEVVQKTA (SEQ ID NO: 1327), TNNQSSYPPSLEQKTA (SEQ ID NO: 1590), TNNQSSYPPSLVKKTA (SEQ ID NO: 1591), or INNQSSYPAEVVQKTA (SEQ ID NO: 1024).
[0183] 41. An AAV capsid variant (e.g., an AAV5 capsid variant) comprising an amino sequence comprising the following formula: [B]-[C], wherein
   [0184] (i) [B] comprises positions X1, X2, and X3, wherein:
      [0185] (a) position X1 is Q, T, S, A, I, L, or H;
      [0186] (b) position X2 is S, G, or A; and
      [0187] (c) position X3 is S, K, L, R, or A; and
   [0188] (ii) [C] comprises the amino acid sequence of YPAEVVQK (SEQ ID NO: 943); and
   [0189] optionally wherein the AAV capsid variant comprises an amino acid modification, e.g., a conservative substitution, of any of the aforesaid amino acids in (i) and/or (ii).
[0190] 42. An AAV capsid variant (e.g., an AAV5 capsid variant) comprising one, two, three, four, or all of:
   [0191] (i) an [A], wherein [A] comprises the amino acid sequence of TNN, TNT, INN, NNN, TNS, or TNK;
   [0192] (ii) a [B], wherein [B] comprises the amino acid sequence of QSS, TSL, SSS, QSR, QSK, AGA, IGS, QAS, ASS, LGS, or HSS;
   [0193] (iii) a [C], wherein [C] comprises the amino acid sequence of YPAEVVQK (SEQ ID NO: 943); and
   [0194] (iv) a [D], wherein [D] comprises the amino acid sequence of TA or PA; and
   [0195] optionally wherein the AAV capsid variant comprises an amino acid modification, e.g., a conservative substitution, of any of the aforesaid amino acids in (i)-(v); and further optionally wherein [C] replaces position 577 relative to a reference sequence numbered according to the amino acid sequence of SEQ ID NO: 138.
[0196] 43. The AAV capsid variant of embodiment 41, wherein:
   [0197] (a) position X1 is Q, T, S, A, or H;
   [0198] (b) position X2 is S or G; and
   [0199] (c) position X3 is S, K, L, or R.
[0200] 44. The AAV capsid variant of embodiment 41 or 43, wherein [B] comprises QS, TS, SS, AG, IG, QA, AS, LG, HS, SK, SL, SR, GA, or GS.
[0201] 45. The AAV capsid variant of any one of embodiments 41-44, wherein [B] is or comprises QSS, TSL, SSS, QSR, QSK, AGA, IGS, QAS, ASS, LGS, or HSS.
[0202] 46. The AAV capsid variant of any one of embodiments 41 or 43-45, wherein [B]-[C] comprises:

(i)
(SEQ ID NO: 572)
SSYPAEVVQK,
(SEQ ID NO: 573)
SKYPAEVVQK,
(SEQ ID NO: 574)
SLYPAEVVQK,
(SEQ ID NO: 575)
SRYPAEVVQK,
(SEQ ID NO: 576)
GAYPAEVVQK,
(SEQ ID NO: 580)
GSYPAEVVQK,
or
(SEQ ID NO: 582)
ASYPAEVVQK;

[0203] (ii) an amino acid sequence comprising any portion of an amino acid sequence in (i), e.g., any 2, 3, 4, 5, 6, 7, 8, or 9 amino acids, e.g., consecutive amino acids, thereof;
[0204] (iii) an amino acid sequence comprising one, two, or three but no more than four modifications, e.g., substitutions (e.g., conservative substitutions), insertions, or deletions, relative to any of the amino acid sequences in (i); or
[0205] (iv) an amino acid sequence comprising one, two, or three but no more than four different amino acids, relative to any one of the amino acid sequences in (i).
[0206] 47. The AAV capsid variant of any one of embodiments 41-46, wherein [B]-[C] is or comprises:

(i)
(SEQ ID NO: 150)
QSSYPAEVVQK,
(SEQ ID NO: 151)
QSKYPAEVVQK,
(SEQ ID NO: 152)
TSLYPAEVVQK,
(SEQ ID NO: 153)
SSSYPAEVVQK,
(SEQ ID NO: 154)
QSRYPAEVVQK,
(SEQ ID NO: 156)
AGAYPAEVVQK,
(SEQ ID NO: 157)
IGSYPAEVVQK,
(SEQ ID NO: 158)
QASYPAEVVQK,
(SEQ ID NO: 159)
ASSYPAEVVQK,
(SEQ ID NO: 160)
LGSYPAEVVQK,
or
(SEQ ID NO: 162)
HSSYPAEVVQK;

[0207] (ii) an amino acid sequence comprising any portion of an amino acid sequence in (i), e.g., any 2, 3, 4, 5, 6, 7, 8, 9, or 10 amino acids, e.g., consecutive amino acids, thereof;
[0208] (iii) an amino acid sequence comprising one, two, or three but no more than four modifications, e.g., substitutions (e.g., conservative substitutions), insertions, or deletions, relative to any of the amino acid sequences in (i); or
[0209] (iv) an amino acid sequence comprising one, two, or three but no more than four different amino acids, relative to any one of the amino acid sequences in (i).
[0210] 48. The AAV capsid variant of any one of embodiments 41-47, wherein [B]-[C] is or comprises QSSYPAEVVQK (SEQ ID NO: 150).
[0211] 49. The AAV capsid variant of any one of embodiments embodiment 41-47, wherein [B]-[C] is or comprises AGAYPAEVVQK (SEQ ID NO: 156), TSLYPAEVVQK (SEQ ID NO: 152), QSKYPAEVVQK (SEQ ID NO: 151), or QSRYPAEVVQK (SEQ ID NO: 154).
[0212] 50. The AAV capsid variant of any one of embodiments 1-49, which further comprises one or both of an amino acid other than T at position 571 (e.g., I or N), and/or an amino acid other than N at position 573 (e.g., T, S, or K), relative to a reference sequence numbered according to the amino acid sequence of SEQ ID NO: 138 or 982.
[0213] 51. The AAV capsid variant of any one of embodiments 1-49, which further comprises:
   [0214] (i) a T at position 571, an N at position 572, and/or an N at position 573, relative to a reference sequence numbered according to the amino acid sequence of SEQ ID NO: 138 or 982;
   [0215] (ii) a T at position 571, an N at position 572, and/or a T at position 573, relative to a reference sequence numbered according to the amino acid sequence of SEQ ID NO: 138 or 982;
   [0216] (iii) an I at position 571, an N at position 572, and/or an N at position 573, relative to a reference sequence numbered according to the amino acid sequence of SEQ ID NO: 138 or 982;
   [0217] (iv) a T at position 571, an N at position 572, and/or an S at position 573, relative to a reference sequence numbered according to the amino acid sequence of SEQ ID NO: 138 or 982;
   [0218] (v) an N at position 571, an N at position 572, and/or an N at position 573, relative to a reference sequence numbered according to the amino acid sequence of SEQ ID NO: 138 or 982; or
   [0219] (vi) a T at position 571, an N at position 572, and/or a K at position 573, relative to a reference sequence numbered according to the amino acid sequence of SEQ ID NO: 138 or 982.
[0220] 52. The AAV capsid variant of any one of embodiments 41-51, which further comprises [A], wherein [A] comprises positions X_{A}, X_{B}, and X_{C}, wherein:
   [0221] (a) position X_{A} is T, I, or N;
   [0222] (b) position X_{B} is N; and
   [0223] (c) position X_{C} is N, T, S, or K; and
   [0224] optionally wherein the AAV capsid variant comprises an amino acid modification, e.g., a conservative substitution, of any of the aforesaid amino acids in (a)-(c).
[0225] 53. The AAV capsid variant of embodiment 52, wherein [A] comprises TN, IN, NN, NT, NS, or NK.
[0226] 54. The AAV capsid variant of any one of embodiments 42, 52, or 53, wherein [A] is or comprises TNN, TNT, INN, NNN, TNS, or TNK.
[0227] 55. The AAV capsid variant of any one of embodiments 42 or 52-54, wherein [A]-[B] is or comprises:

(i)
(SEQ ID NO: 183)
TNNQSS,
(SEQ ID NO: 184)
TNNQSK,
(SEQ ID NO: 185)
TNNTSL,
(SEQ ID NO: 186)
TNNSSS,
(SEQ ID NO: 187)
TNNQSR,
(SEQ ID NO: 188)
TNNAGA,
(SEQ ID NO: 189)
TNNIGS,
(SEQ ID NO: 190)
TNNQAS,
(SEQ ID NO: 191)
TNTASS,
(SEQ ID NO: 192)
TNNLGS,
(SEQ ID NO: 194)
TNNHSS,
(SEQ ID NO: 196)
INNQSS,
(SEQ ID NO: 198)
NNNQSR,
(SEQ ID NO: 199)
TNSTSL,
or
(SEQ ID NO: 201)
TNKQAS;

[0228] (ii) an amino acid sequence comprising any portion of an amino acid sequence in (i), e.g., any 2, 3, 4, or 5 amino acids, e.g., consecutive amino acids, thereof;
[0229] (iii) an amino acid sequence comprising one, two, or three but no more than four modifications, e.g., substitutions (e.g., conservative substitutions), insertions, or deletions, relative to any of the amino acid sequences in (i); or
[0230] (iv) an amino acid sequence comprising one, two, or three but no more than four different amino acids, relative to any one of the amino acid sequences in (i).
[0231] 56. The AAV capsid variant of any one of embodiments 42 or 52-55, wherein [A]-[B]-[C] is or comprises:

(i)
(SEQ ID NO: 500)
TNNQSSYPAEVVQK,
(SEQ ID NO: 503)
TNNQSKYPAEVVQK,
(SEQ ID NO: 506)
TNNTSLYPAEVVQK,
(SEQ ID NO: 508)
TNNSSSYPAEVVQK,
(SEQ ID NO: 510)
TNNQSRYPAEVVQK,
(SEQ ID NO: 513)
TNNAGAYPAEVVQK,
(SEQ ID NO: 514)
TNNIGSYPAEVVQK,
(SEQ ID NO: 517)
TNNQASYPAEVVQK,
(SEQ ID NO: 520)
TNTASSYPAEVVQK,
(SEQ ID NO: 523)
TNNLGSYPAEVVQK,
(SEQ ID NO: 525)
TNNHSSYPAEVVQK,
(SEQ ID NO: 543)
INNQSSYPAEVVQK,
(SEQ ID NO: 552)
NNNQSRYPAEVVQK,
(SEQ ID NO: 556)
TNSTSLYPAEVVQK,
or
(SEQ ID NO: 563)
TNKQASYPAEVVQK;

[0232] (ii) an amino acid sequence comprising any portion of an amino acid sequence in (i), e.g., any 2, 3, 4, 5, 6, 7, 8, 9, 10, 11, 12, or 13 amino acids, e.g., consecutive amino acids, thereof;
[0233] (iii) an amino acid sequence comprising one, two, or three but no more than four modifications, e.g., substitutions (e.g., conservative substitutions), insertions, or deletions, relative to any of the amino acid sequences in (i); or
[0234] (iv) an amino acid sequence comprising one, two, or three but no more than four different amino acids, relative to any one of the amino acid sequences in (i).
[0235] 57. The AAV capsid variant of any one of embodiments 42 or 52-54, wherein [A]-[B]-[C] is or comprises TNNQSSYPAEVVQK (SEQ ID NO: 500).
[0236] 58. The AAV capsid variant of any one of embodiments 42 or 52-54, wherein [A]-[B]-[C] is or comprises TNNAGAYPAEVVQK (SEQ ID NO: 513), TNNTSLYPAEVVQK (SEQ ID NO: 506), TNNQSKYPAEVVQK (SEQ ID NO: 503), TNNQSRYPAEVVQK (SEQ ID NO: 510), or INNQSSYPAEVVQK (SEQ ID NO: 543).
[0237] 59. The AAV capsid variant of any one of embodiments 1-58, which further comprises:
   [0238] (i) an amino acid other than T at position 578 (e.g., P or N), relative to a reference sequence numbered according to the amino acid sequence of SEQ ID NO: 138; or an
   [0239] (ii) an amino acid other than T at position 585 (e.g., P or N), relative to a reference sequence numbered according to the amino acid sequence of SEQ ID NO: 982.
[0240] 60. The AAV capsid variant of any one of embodiments 1-58, which further comprises:
   [0241] (i) a T at position 578 and/or an A at position 579, relative to a reference sequence numbered according to the amino acid sequence of SEQ ID NO: 138; or a T at position 585 and/or an A at position 586 relative to a reference sequence numbered according to SEQ ID NO: 982;
   [0242] (ii) a P at position 578 and/or an A at position 579, relative to a reference sequence numbered according to the amino acid sequence of SEQ ID NO: 138; or a P at position 585 and/or an A at position 586 relative to a reference sequence numbered according to SEQ ID NO: 982; or
   [0243] (iii) an N at position 578 and/or an A at position 579, relative to a reference sequence numbered according to the amino acid sequence of SEQ ID NO: 138; or an N at position 585 and/or an A at position 586 relative to a reference sequence numbered according to SEQ ID NO: 982.
[0244] 61. The AAV capsid variant of any one of embodiments 41-60, which further comprises [D], wherein [D] comprises positions X4 and X5, wherein:
   [0245] (a) position X4 is T or N; and
   [0246] (b) position X5 is A; and
   [0247] optionally wherein the AAV capsid variant comprises an amino acid modification, e.g., a conservative substitution, of any of the aforesaid amino acids in (a) or (b).
[0248] 62. The AAV capsid variant of embodiment 42 or 61, wherein [D] is or comprises TA or PA.
[0249] 63. The AAV capsid variant of any one of embodiments 42, 61, or 62, wherein [C]-[D] is or comprises:
   [0250] (i) YPAEVVQKTA (SEQ ID NO: 584) or YPAEVVQKPA (SEQ ID NO: 586);
   [0251] (ii) an amino acid sequence comprising any portion of an amino acid sequence in (i), e.g., any 2, 3, 4, 5, 6, 7, 8, or 9 amino acids, e.g., consecutive amino acids, thereof;
   [0252] (iii) an amino acid sequence comprising one, two, or three but no more than four modifications, e.g., substitutions (e.g., conservative substitutions), insertions, or deletions, relative to any of the amino acid sequences in (i); or
   [0253] (iv) an amino acid sequence comprising one, two, or three but no more than four different amino acids, relative to any one of the amino acid sequences in (i).
[0254] 64. The AAV capsid variant of any one of embodiments 42 or 61-63, wherein [A]-[B]-[C]-[D] is or comprises:

(i)
(SEQ ID NO: 1533)
TNNQSSYPAEVVQKTA,
(SEQ ID NO: 1538)
TNNQSKYPAEVVQKTA,
(SEQ ID NO: 1232)
TNNTSLYPAEVVQKTA,
(SEQ ID NO: 1539)
TNNSSSYPAEVVQKTA,
(SEQ ID NO: 1327)
TNNQSRYPAEVVQKTA,
(SEQ ID NO: 1021)
TNNAGAYPAEVVQKTA,
(SEQ ID NO: 1112)
TNNIGSYPAEVVQKTA,
(SEQ ID NO: 1194)
TNNQASYPAEVVQKTA,
(SEQ ID NO: 1575)
TNTASSYPAEVVQKTA,
(SEQ ID NO: 1027)
TNNLGSYPAEVVQKTA,
(SEQ ID NO: 1310)
TNNHSSYPAEVVQKTA,
(SEQ ID NO: 1142)
TNNSSSYPAEVVQKPA,
(SEQ ID NO: 1024)
INNQSSYPAEVVQKTA,
(SEQ ID NO: 1601)
NNNQSRYPAEVVQKTA,
(SEQ ID NO: 1605)
TNSTSLYPAEVVQKTA,
or
(SEQ ID NO: 1587)
TNKQASYPAEVVQKTA;

[0255] (ii) an amino acid sequence comprising any portion of an amino acid sequence in (i), e.g., any 2, 3, 4, 5, 6, 7, 8, 9, 10, 11, 12, 13, 14, or 15 amino acids, e.g., consecutive amino acids, thereof;
[0256] (iii) an amino acid sequence comprising one, two, or three but no more than four modifications, e.g., substitutions (e.g., conservative substitutions), insertions, or deletions, relative to any of the amino acid sequences in (i); or
[0257] (iv) an amino acid sequence comprising one, two, or three but no more than four different amino acids, relative to any one of the amino acid sequences in (i).
[0258] 65. The AAV capsid variant of any one of embodiments 42 or 61-64, wherein [A]-[B]-[C]-[D] is or comprises TNNQSSYPAEVVQKTA (SEQ ID NO: 1533).
[0259] 66. The AAV capsid variant of any one of embodiments 42 or 61-64, wherein [A]-[B]-[C]-[D] is or comprises TNNAGAYPAEVVQKTA (SEQ ID NO: 1021), TNNTSLYPAEVVQKTA (SEQ ID NO: 1232), TNNQSKYPAEVVQKTA (SEQ ID NO: 1538), TNNQSRYPAEVVQKTA (SEQ ID NO: 1327), or INNQSSYPAEVVQKTA (SEQ ID NO: 1024).
[0260] 67. An AAV capsid variant (e.g., an AAV5 capsid variant), comprising an amino sequence comprising the formula [N2]-[N3], wherein:
   [0261] (i) [N2] comprises positions X1, X2, X3, X4, and X5, wherein:
      [0262] (a) position X1 is Y or T;
      [0263] (b) position X2 is Q, T, P, or E;
      [0264] (c) position X3 is A;
      [0265] (d) position X4 is E or D; and
      [0266] (e) position X5 is V or E; and
   [0267] (ii) [N3] comprises the amino acid sequence of VQK or VQN; or wherein the AAV capsid variant comprises an amino acid modification, e.g., a conservative substitution, of any of the aforesaid amino acids in (i) and/or (ii).
[0268] 68. An AAV capsid variant (e.g., an AAV5 capsid variant) comprising one, two, three, four, or all of:
   [0269] (i) an [N0] comprising TNN, TNS, TNT, or TNK;
   [0270] (ii) an [N1] comprising QSS, SLS, SLY, SAT, or QTS;
   [0271] (iii) an [N2] comprising YPAEV (SEQ ID NO: 1), YQAEV (SEQ ID NO: 6), YTAEV (SEQ ID NO: 4), YPAEE (SEQ ID NO: 5), TEAEV (SEQ ID NO: 12), or YPADV (SEQ ID NO: 13);
   [0272] (iv) an [N3] comprising VQK or VQN; and
   [0273] (v) an [N4] comprising TA, PA, TD, NA, or PA; and
   [0274] optionally wherein the AAV capsid variant comprises an amino acid modification, e.g., a conservative substitution, of any of the aforesaid amino acids in (i)-(v).
[0275] 69. The AAV capsid variant of embodiment 1 or 67, wherein [N2] comprises YP, YQ, YT, TE, QA, TA, PA, EA, EV, EE, DV, AE, or AD.
[0276] 70. The AAV capsid variant of any one of embodiments 1, 67 or 69, wherein [N2] comprises YPA, YQA, YTA, TEA, QAE, TAE, PAE, EAE, PAD, AEV, AEE, or ADV.
[0277] 71. The AAV capsid variant of any one of embodiments 1, 67, 69, or 70, wherein [N2] comprises

(SEQ ID NO: 21)
YPAE,
(SEQ ID NO: 25)
YQAE,
(SEQ ID NO: 24)
YTAE,
(SEQ ID NO: 587)
TEAE,
(SEQ ID NO: 588)
YPAD,
(SEQ ID NO: 15)
QAEV,
(SEQ ID NO: 16)
TAEV,
(SEQ ID NO: 17)
PAEV,
(SEQ ID NO: 18)
PAEE,
(SEQ ID NO: 590)
EAEV,
or
(SEQ ID NO: 19)
PADV.

[0278] 72. The AAV capsid variant of any one of embodiments 1 or 67-71, wherein [N2] is or comprises

(SEQ ID NO: 1)
YPAEV,
(SEQ ID NO: 6)
YQAEV,
(SEQ ID NO: 4)
YTAEV,
(SEQ ID NO: 5)
YPAEE,
(SEQ ID NO: 12)
TEAEV,
or
(SEQ ID NO: 13)
YPADV.

[0279] 73. The AAV capsid variant of any one of embodiments 1 or 67-72, wherein [N3] comprises the amino acid sequence of VQK.
[0280] 74. The AAV capsid variant of any one of embodiments 1, 67, or 69-73, wherein [N2]-[N3] comprises:

(i)
(SEQ ID NO: 36)
AEVVQK,
(SEQ ID NO: 39)
AEEVQK,
(SEQ ID NO: 591)
AEVVQN,
or
(SEQ ID NO: 593)
ADVVQK;

[0281] (ii) an amino acid sequence comprising any portion of an amino acid sequence in (i), e.g., any 2, 3, 4, or 5 amino acids, e.g., consecutive amino acids, thereof;
[0282] (iii) an amino acid sequence comprising one, two, or three but no more than four modifications, e.g., substitutions (e.g., conservative substitutions), insertions, or deletions, relative to any of the amino acid sequences in (i); or
[0283] (iv) an amino acid sequence comprising one, two, or three but no more than four different amino acids, relative to any one of the amino acid sequences in (i).
[0284] 75. The AAV capsid variant of any one of embodiments 1, 67, or 69-74, wherein [N2]-[N3] comprises:

(i)
(SEQ ID NO: 594)
PAEVVQN,
(SEQ ID NO: 52)
QAEVVQK,
(SEQ ID NO: 49)
TAEVVQK,
(SEQ ID NO: 20)
PAEVVQK,
(SEQ ID NO: 51)
PAEEVQK,
(SEQ ID NO: 595)
EAEVVQK,
or
(SEQ ID NO: 596)
PADVVQK;

[0285] (ii) an amino acid sequence comprising any portion of an amino acid sequence in (i), e.g., any 2, 3, 4, 5, or 6 amino acids, e.g., consecutive amino acids, thereof;
[0286] (iii) an amino acid sequence comprising one, two, or three but no more than four modifications, e.g., substitutions (e.g., conservative substitutions), insertions, or deletions, relative to any of the amino acid sequences in (i); or
[0287] (iv) an amino acid sequence comprising one, two, or three but no more than four different amino acids, relative to any one of the amino acid sequences in (i).
[0288] 76. The AAV capsid variant of any one of embodiments 1 or 57-75, wherein [N2]-[N3] is or comprises:

(i)
(SEQ ID NO: 943)
YPAEVVQK,
(SEQ ID NO: 951)
YQAEVVQK,
(SEQ ID NO: 948)
YTAEVVQK,
(SEQ ID NO: 950)
YPAEEVQK,
(SEQ ID NO: 964)
YPAEVVQN,
(SEQ ID NO: 965)
TEAEVVQK,
or
(SEQ ID NO: 966)
YPADVVQK;

[0289] (ii) an amino acid sequence comprising any portion of an amino acid sequence in (i), e.g., any 2, 3, 4, 5, 6, or 7 amino acids, e.g., consecutive amino acids, thereof;
[0290] (iii) an amino acid sequence comprising one, two, or three but no more than four modifications, e.g., substitutions (e.g., conservative substitutions), insertions, or deletions, relative to any of the amino acid sequences in (i); or
[0291] (iv) an amino acid sequence comprising one, two, or three but no more than four different amino acids, relative to any one of the amino acid sequences in (i).
[0292] 77. The AAV capsid variant of any one of embodiments 1 or 67-76, wherein [N2]-[N3] is or comprises YPAEVVQK (SEQ ID NO: 943).
[0293] 78. The AAV capsid variant of any one of embodiments 1-77, wherein [N2]-[N3] replaces position 577, relative to a reference sequence numbered according to the amino acid sequence of SEQ ID NO: 138.
[0294] 79. The AAV capsid variant of any one of embodiments 1 or 67-78, which further comprises one, two, three or all of an amino acid other than Q at position 574 (e.g., S), an amino acid other than S at position 575 (e.g., L, A, or T), and/or an amino acid other than S at position 576 (e.g., Y or T), relative to a reference sequence numbered according to the amino acid sequence of SEQ ID NO: 138 or 982.
[0295] 80. The AAV capsid variant of any one of embodiments 1 or 67-78, which further comprises:
   [0296] (i) a Q at position 574, an S at position 575, and/or an S at position 576, relative to a reference sequence numbered according to the amino acid sequence of SEQ ID NO: 138 or 982;
   [0297] (ii) an S at position 574, an L at position 575, and/or an S at position 576, relative to a reference sequence numbered according to the amino acid sequence of SEQ ID NO: 138 or 982;
   [0298] (iii) an S at position 574, an L at position 575, and/or a Y at position 576, relative to a reference sequence numbered according to the amino acid sequence of SEQ ID NO: 138 or 982;
   [0299] (iv) an S at position 574, an A at position 575, and/or a T at position 576, relative to a reference sequence numbered according to the amino acid sequence of SEQ ID NO: 138 or 982; or (v) a Q at position 574, a T at position 575, and/or an S at position 576, relative to a reference sequence numbered according to the amino acid sequence of SEQ ID NO: 138 or 982.
[0300] 81. The AAV capsid variant of any one of embodiments 1 or 67-80, which further comprises [N1], wherein [N1] comprises positions X_{D}, X_{E}, and X_{F}, wherein:
   [0301] (a) position X_{D} is Q or S;
   [0302] (b) position X_{E} is S, L, A, or T; and
   [0303] (c) position X_{F} is S, Y, or T; and
   [0304] optionally wherein the AAV capsid variant comprises an amino acid modification, e.g., a conservative substitution, of any of the aforesaid amino acids in (a)-(c).
[0305] 82. The AAV capsid variant of embodiment 81, wherein [N1] comprises QS, SL, SA, QT, LS, LY, AT, TS, or SS.
[0306] 83. The AAV capsid variant of any one of embodiment 68, 81, 82, wherein [N1] is or comprises QSS, SLS, SLY, SAT, or QTS.
[0307] 84. The AAV capsid variant of any one of embodiments 81-83, wherein [N1]-[N2] comprises:

(i)
(SEQ ID NO: 63)
SSYPA,
(SEQ ID NO: 597)
LSYQA,
(SEQ ID NO: 598)
LSYTA,
(SEQ ID NO: 600)
LYYPA,
(SEQ ID NO: 601)
ATYPA,
(SEQ ID NO: 603)
LSYPA,
or
(SEQ ID NO: 605)
TSTEA;

[0308] (ii) an amino acid sequence comprising any portion of an amino acid sequence in (i), e.g., any 2, 3, or 4 amino acids, e.g., consecutive amino acids, thereof;
[0309] (iii) an amino acid sequence comprising one, two, or three but no more than four modifications, e.g., substitutions (e.g., conservative substitutions), insertions, or deletions, relative to any of the amino acid sequences in (i); or
[0310] (iv) an amino acid sequence comprising one, two, or three but no more than four different amino acids, relative to any one of the amino acid sequences in (i).
[0311] 85. The AAV capsid variant of any one of embodiments 81-84, wherein [N1]-[N2] comprises:

(i)
(SEQ ID NO: 79)
SSYPAE,
(SEQ ID NO: 607)
LSYQAE,
(SEQ ID NO: 610)
LSYTAE,
(SEQ ID NO: 611)
LYYPAE,
(SEQ ID NO: 613)
ATYPAE,
(SEQ ID NO: 616)
LSYPAE,
(SEQ ID NO: 619)
TSTEAE,
or
(SEQ ID NO: 621)
LSYPAD;

[0312] (ii) an amino acid sequence comprising any portion of an amino acid sequence in (i), e.g., any 2, 3, 4, or 5 amino acids, e.g., consecutive amino acids, thereof;
[0313] (iii) an amino acid sequence comprising one, two, or three but no more than four modifications, e.g., substitutions (e.g., conservative substitutions), insertions, or deletions, relative to any of the amino acid sequences in (i); or
[0314] (iv) an amino acid sequence comprising one, two, or three but no more than four different amino acids, relative to any one of the amino acid sequences in (i).
[0315] 86. The AAV capsid variant of any one of embodiments 68 or 81-85, wherein [N1]-[N2] is or comprises:

(i)
(SEQ ID NO: 96)
QSSYPAEV,
(SEQ ID NO: 622)
SLSYQAEV,
(SEQ ID NO: 623)
SLSYTAEV,
(SEQ ID NO: 624)
SLYYPAEV,
(SEQ ID NO: 625)
SATYPAEV,
(SEQ ID NO: 629)
SLSYPAEV,
(SEQ ID NO: 632)
SLSYPAEE,
(SEQ ID NO: 633)
QTSTEAEV,
or
(SEQ ID NO: 634)
SLSYPADV;

[0316] (ii) an amino acid sequence comprising any portion of an amino acid sequence in (i), e.g., any 2, 3, 4, 5, 6, or 7 amino acids, e.g., consecutive amino acids, thereof;
[0317] (iii) an amino acid sequence comprising one, two, or three but no more than four modifications, e.g., substitutions (e.g., conservative substitutions), insertions, or deletions, relative to any of the amino acid sequences in (i); or
[0318] (iv) an amino acid sequence comprising one, two, or three but no more than four different amino acids, relative to any one of the amino acid sequences in (i).
[0319] 87. The AAV capsid variant of any one of embodiments 68 or 81-86, wherein [N1]-[N2]-[N3] is or comprises:

(i)
(SEQ ID NO: 150)
QSSYPAEVVQK,
(SEQ ID NO: 635)
SLSYQAEVVQK,
(SEQ ID NO: 637)
SLSYTAEVVQK,
(SEQ ID NO: 639)
SLYYPAEVVQK,
(SEQ ID NO: 641)
SATYPAEVVQK,
(SEQ ID NO: 642)
SLSYPAEVVQK,
(SEQ ID NO: 643)
SLSYPAEEVQK,
(SEQ ID NO: 644)
SLSYPAEVVQN,
(SEQ ID NO: 645)
QTSTEAEVVQK,
or
(SEQ ID NO: 646)
SLSYPADVVQK;

[0320] (ii) an amino acid sequence comprising any portion of an amino acid sequence in (i), e.g., any 2, 3, 4, 5, 6, 7, 8, 9, 10, 11, or 12 amino acids, e.g., consecutive amino acids, thereof;
[0321] (iii) an amino acid sequence comprising one, two, or three but no more than four modifications, e.g., substitutions (e.g., conservative substitutions), insertions, or deletions, relative to any of the amino acid sequences in (i); or
[0322] (iv) an amino acid sequence comprising one, two, or three but no more than four different amino acids, relative to any one of the amino acid sequences in (i).
[0323] 88. The AAV capsid variant of any one of embodiments 68 or 81-87, wherein [N1]-[N2]-[N3] is or comprises QSSYPAEVVQK (SEQ ID NO: 150).
[0324] 89. The AAV capsid variant of any one of embodiments 1 or 67-88, which further comprises [N0], wherein [N0] comprises positions X_{A}, X_{B}, and X_{C}, wherein:
   [0325] (a) position X_{A} is T;
   [0326] (b) position X_{B} is N; and
   [0327] (c) position X_{C} is N, T, S, or K; and
   [0328] optionally wherein the AAV capsid comprises an amino acid modification, e.g., a conservative substitution, of any of the aforesaid amino acids in (a)-(c).
[0329] 90. The AAV capsid variant of embodiment 89, wherein [N0]:
   [0330] (i) comprises TN, NS, NT, NN, or NK; and/or
   [0331] (ii) is or comprises TNS, TNT, TNN, or TNK.
[0332] 91. The AAV capsid variant of any one of embodiments 68, 89, or 90, wherein [N0]-[N1] is or comprises:

(i)
(SEQ ID NO: 183)
TNNQSS,
(SEQ ID NO: 647)
TNSSLS,
(SEQ ID NO: 648)
TNSSLY,
(SEQ ID NO: 649)
TNTSAT,
(SEQ ID NO: 650)
TNNQTS,
or
(SEQ ID NO: 651
TNKSAT;

[0333] (ii) an amino acid sequence comprising any portion of an amino acid sequence in (i), e.g., any 2, 3, 4, or 5 amino acids, e.g., consecutive amino acids, thereof;
[0334] (iii) an amino acid sequence comprising one, two, or three but no more than four modifications, e.g., substitutions (e.g., conservative substitutions), insertions, or deletions, relative to any of the amino acid sequences in (i); or
[0335] (iv) an amino acid sequence comprising one, two, or three but no more than four different amino acids, relative to any one of the amino acid sequences in (i).
[0336] 92. The AAV capsid variant of any one of embodiments 68 or 89-91, wherein [N0]-[N1]-[N2]-[N3] is or comprises:

(i)
(SEQ ID NO: 500)
TNNQSSYPAEVVQK,
(SEQ ID NO: 652)
TNSSLSYQAEVVQK,
(SEQ ID NO: 654)
TNSSLSYTAEVVQK,
(SEQ ID NO: 655)
TNSSLYYPAEVVQK,
(SEQ ID NO: 656)
TNTSATYPAEVVQK,
(SEQ ID NO: 657)
TNSSLSYPAEVVQK,
(SEQ ID NO: 658)
TNSSLSYPAEEVQK,
(SEQ ID NO: 660)
TNSSLSYPAEVVQN,
(SEQ ID NO: 662)
TNNQTSTEAEVVQK,
(SEQ ID NO: 663)
TNKSATYPAEVVQK,
or
(SEQ ID NO: 665)
TNSSLSYPADVVQK;

[0337] (ii) an amino acid sequence comprising any portion of an amino acid sequence in (i), e.g., any 2, 3, 4, 5, 6, 7, 8, 9, 10, 11, 12, or 13 amino acids, e.g., consecutive amino acids, thereof;
[0338] (iii) an amino acid sequence comprising one, two, or three but no more than four modifications, e.g., substitutions (e.g., conservative substitutions), insertions, or deletions, relative to any of the amino acid sequences in (i); or
[0339] (iv) an amino acid sequence comprising one, two, or three but no more than four different amino acids, relative to any one of the amino acid sequences in (i).
[0340] 93. The AAV capsid variant of any one of embodiments 68 or 89-92, wherein [N0]-[N1]-[N2]-[N3] is or comprises TNNQSSYPAEVVQK (SEQ ID NO: 500).
[0341] 94. The AAV capsid variant of any one of embodiments 1 or 67-93, which further comprises [N4], wherein [N4] comprises positions X_{G} and X_{H}, wherein:
   [0342] (a) position X_{G} is T, P, or N; and
   [0343] (b) position X_{H} is A or D; and
   [0344] optionally wherein the AAV capsid variant comprise an amino acid modification, e.g., a conservative substitution, of any of the aforesaid amino acids in (a) or (b).
[0345] 95. The AAV capsid variant of embodiment 94, wherein [N4] is or comprises TA, TD, PA, or NA.
[0346] 96. The AAV capsid variant of embodiment 68, 94, or 95, wherein [N3]-[N4] is or comprises:

(i)
(SEQ ID NO: 564)
VQKTA,
(SEQ ID NO: 565)
EQKTA,
(SEQ ID NO: 566)
VKKTA,
(SEQ ID NO: 567)
VQKPA,
(SEQ ID NO: 568)
VHKTA,
(SEQ ID NO: 569)
VQQTA,
(SEQ ID NO: 570)
VQKNA,
or
(SEQ ID NO: 571)
LQKTA;

[0347] (ii) an amino acid sequence comprising any portion of an amino acid sequence in (i), e.g., any 2, 3, or 4 amino acids, e.g., consecutive amino acids, thereof;
[0348] (iii) an amino acid sequence comprising one, two, or three but no more than four modifications, e.g., substitutions (e.g., conservative substitutions), insertions, or deletions, relative to any of the amino acid sequences in (i); or
[0349] (iv) an amino acid sequence comprising one, two, or three but no more than four different amino acids, relative to any one of the amino acid sequences in (i).
[0350] 97. The AAV capsid variant of any one of embodiments 68 or 94-96, wherein [N0]-[N1]-[N2]-[N3]-[N4] is or comprises:

(i)
(SEQ ID NO: 1533)
TNNQSSYPAEVVQKTA,
(SEQ ID NO: 2064)
TNSSLSYQAEVVQKTA,
(SEQ ID NO: 2065)
TNSSLSYTAEVVQKTA,
(SEQ ID NO: 2066)
TNSSLYYPAEVVQKTA,
(SEQ ID NO: 2067)
TNTSATYPAEVVQKTA,
(SEQ ID NO: 2068)
TNSSLSYPAEVVQKTA,
(SEQ ID NO: 2069)
TNSSLSYPAEEVQKTA,
(SEQ ID NO: 2070)
TNSSLSYPAEVVQKTD,
(SEQ ID NO: 2071)
TNSSLSYPAEVVQNTA,
(SEQ ID NO: 2072)
TNSSLSYPAEVVQKNA,
(SEQ ID NO: 2073)
TNSSLSYPAEVVQKPA,
(SEQ ID NO: 2074)
TNNQTSTEAEVVQKTA,
(SEQ ID NO: 2075)
TNKSATYPAEVVQKTA,
or
(SEQ ID NO: 2076)
TNSSLSYPADVVQKTA;

[0351] (ii) an amino acid sequence comprising any portion of an amino acid sequence in (i), e.g., any 2, 3, 4, 5, 6, 7, 8, 9, 10, 11, 12, 13, 14, or 15 amino acids, e.g., consecutive amino acids, thereof;
[0352] (iii) an amino acid sequence comprising one, two, or three but no more than four modifications, e.g., substitutions (e.g., conservative substitutions), insertions, or deletions, relative to any of the amino acid sequences in (i); or
[0353] (iv) an amino acid sequence comprising one, two, or three but no more than four different amino acids, relative to any one of the amino acid sequences in (i).
[0354] 98. The AAV capsid variant of any one of embodiments 68 or 94-97, wherein [N0]-[N1]-[N2]-[N3]-[N4] is or comprises TNNQSSYPAEVVQKTA (SEQ ID NO: 1533).
[0355] 99. An AAV capsid variant (e.g., an AAV5 capsid variant) comprises the formula [K1]-[K2], wherein:
   [0356] (i) [K1] comprises LSY or LYY; and
   [0357] (ii) [K2] comprises positions X1, X2, X3, and X4, wherein:
      [0358] (a) position X1 is Q, T, or P;
      [0359] (b) position X2 is A;
      [0360] (c) position X3 is E or D; and
      [0361] (d) position X4 is V or E; and
   [0362] optionally wherein the AAV capsid variant comprises an amino acid modification, e.g., a conservative substitution, of any of the aforesaid amino acids in (i) and/or (ii).
[0363] 100. An AAV capsid variant (e.g., an AAV5 capsid variant) comprising one, two, three, four, or all of:
   [0364] (i) an [K0], which comprises TNNS (SEQ ID NO: 14);
   [0365] (ii) an [K1], which comprises LSY or LYY;
   [0366] (iii) an [K2], which comprises QAEV (SEQ ID NO: 15), TAEV (SEQ ID NO: 16), PAEV (SEQ ID NO: 17), PAEE (SEQ ID NO: 18), or PADV (SEQ ID NO: 19);
   [0367] (iv) an [K3], which comprise VQK or VQN; and
   [0368] (v) an [K4], which comprises TA, TD, NA, or PA; and
   [0369] optionally wherein the AAV capsid variant comprises an amino acid modification, e.g., a conservative substitution, of any of the aforesaid amino acids in (i)-(v).
[0370] 101. The AAV capsid variant of embodiment 99 or 100, wherein [K1] comprises LSY.
[0371] 102. The AAV capsid variant of embodiment 99 or 101, wherein [K2] comprises QA, TA, PA, EV, EE, DV, AE, or AD.
[0372] 103. The AAV capsid variant of any one of embodiments 99, 101, or 102, wherein [K2] comprises QAE, TAE, PAE, PAD, AEV, AEE, or ADV.
[0373] 104. The AAV capsid variant of any one of embodiments 99-103, wherein [K2] is or comprises

(SEQ ID NO: 15)
QAEV,
(SEQ ID NO: 16)
TAEV,
(SEQ ID NO: 17)
PAEV,
(SEQ ID NO: 18)
PAEE,
or
(SEQ ID NO: 19)
PADV.

[0374] 105. The AAV capsid variant of any one of embodiments 99 or 101-104, wherein [K1]-[K2] comprises LSYQA (SEQ ID NO: 597), LSYTA (SEQ ID NO: 598), LYYPA (SEQ ID NO: 600), or LSYPA (SEQ ID NO: 603).
[0375] 106. The AAV capsid variant of any one of embodiments 99 or 101-105, wherein [K1]-[K2] comprises:

(i)
(SEQ ID NO: 607)
LSYQAE,
(SEQ ID NO: 610)
LSYTAE,
(SEQ ID NO: 611)
LYYPAE,
(SEQ ID NO: 616)
LSYPAE,
or
(SEQ ID NO: 621)
LSYPAD;

[0376] (ii) an amino acid sequence comprising any portion of an amino acid sequence in (i), e.g., any 2, 3, 4, or 5 amino acids, e.g., consecutive amino acids, thereof;
[0377] (iii) an amino acid sequence comprising one, two, or three but no more than four modifications, e.g., substitutions (e.g., conservative substitutions), insertions, or deletions, relative to any of the amino acid sequences in (i); or
[0378] (iv) an amino acid sequence comprising one, two, or three but no more than four different amino acids, relative to any one of the amino acid sequences in (i).
[0379] 107. The AAV capsid variant of any one of embodiments 99-106, wherein [K1]-[K2] is or comprises:

(i)
(SEQ ID NO: 667)
LSYQAEV,
(SEQ ID NO: 668)
LSYTAEV,
(SEQ ID NO: 669)
LYYPAEV,
(SEQ ID NO: 671)
LSYPAEV,
(SEQ ID NO: 673)
LSYPAEE,
or
(SEQ ID NO: 674)
LSYPADV;

[0380] (ii) an amino acid sequence comprising any portion of an amino acid sequence in (i), e.g., any 2, 3, 4, 5, or 6 amino acids, e.g., consecutive amino acids, thereof;
[0381] (iii) an amino acid sequence comprising one, two, or three but no more than four modifications, e.g., substitutions (e.g., conservative substitutions), insertions, or deletions, relative to any of the amino acid sequences in (i); or
[0382] (iv) an amino acid sequence comprising one, two, or three but no more than four different amino acids, relative to any one of the amino acid sequences in (i).
[0383] 108. The AAV capsid variant of any one of embodiments 99-107, which further comprises an amino acid other than Q at position 574 (e.g., S), relative to a reference sequence numbered according to the amino acid sequence of SEQ ID NO: 138.
[0384] 109. The AAV capsid variant of any one of embodiments 99-108, which further comprises S at position 574, relative to a reference sequence numbered according to the amino acid sequence of SEQ ID NO: 138.
[0385] 110. The AAV capsid variant of any one of embodiments 99-109, which further comprises [K0], wherein [K0] is or comprises TNNS (SEQ ID NO: 14); an amino acid sequence comprising any portion of an amino acid sequence, e.g., any 2 or 3 amino acids, e.g., consecutive amino acids, thereof; an amino acid sequence comprising one, two, or three but no more than four modifications, e.g., substitutions (e.g., conservative substitutions), insertions, or deletions, relative to the amino acid sequence of TNNS (SEQ ID NO: 14); or an amino acid sequence comprising one, two, or three but no more than four different amino acids, relative to the amino acid sequence of TNNS (SEQ ID NO: 14).
[0386] 111. The AAV capsid variant of embodiment 110, wherein [K0]-[K1] comprises:

(i)
(SEQ ID NO: 647)
TNSSLS
or
(SEQ ID NO: 648)
TNSSLY;

[0387] (ii) an amino acid sequence comprising any portion of an amino acid sequence in (i), e.g., any 2, 3, 4, or 5 amino acids, e.g., consecutive amino acids, thereof;
[0388] (iii) an amino acid sequence comprising one, two, or three but no more than four modifications, e.g., substitutions (e.g., conservative substitutions), insertions, or deletions, relative to any of the amino acid sequences in (i); or
[0389] (iv) an amino acid sequence comprising one, two, or three but no more than four different amino acids, relative to any one of the amino acid sequences in (i).
[0390] 112. The AAV capsid variant of any one of embodiments 100, 110 or 111, wherein [K0]-[K1] is or comprises:

(i)
(SEQ ID NO: 676)
TNSSLSY
or
(SEQ ID NO: 678)
TNSSLYY;

[0391] (ii) an amino acid sequence comprising any portion of an amino acid sequence in (i), e.g., any 2, 3, 4, 5, or 6 amino acids, e.g., consecutive amino acids, thereof;
[0392] (iii) an amino acid sequence comprising one, two, or three but no more than four modifications, e.g., substitutions (e.g., conservative substitutions), insertions, or deletions, relative to any of the amino acid sequences in (i); or
[0393] (iv) an amino acid sequence comprising one, two, or three but no more than four different amino acids, relative to any one of the amino acid sequences in (i).
[0394] 113. The AAV capsid variant of any one of embodiments 110-112, wherein [K0]-[K1]-[K2] comprises:

(i)
(SEQ ID NO: 679)
TNSSLSYQA,
(SEQ ID NO: 681)
TNSSLSYTA,
(SEQ ID NO: 682)
TNSSLYYPA,
or
(SEQ ID NO: 683)
TNSSLSYPA;

[0395] (ii) an amino acid sequence comprising any portion of an amino acid sequence in (i), e.g., any 2, 3, 4, 5, 6, 7, or 8 amino acids, e.g., consecutive amino acids, thereof;
[0396] (iii) an amino acid sequence comprising one, two, or three but no more than four modifications, e.g., substitutions (e.g., conservative substitutions), insertions, or deletions, relative to any of the amino acid sequences in (i); or
[0397] (iv) an amino acid sequence comprising one, two, or three but no more than four different amino acids, relative to any one of the amino acid sequences in (i).
[0398] 114. The AAV capsid variant of any one of embodiments 110-113, wherein [K0]-[K1]-[K2] comprises:

(i)
(SEQ ID NO: 684)
TNSSLSYQAE,
(SEQ ID NO: 685)
TNSSLSYTAE,
(SEQ ID NO: 686)
TNSSLYYPAE,
(SEQ ID NO: 687)
TNSSLSYPAE,
or
(SEQ ID NO: 689)
TNSSLSYPAD;

[0399] (ii) an amino acid sequence comprising any portion of an amino acid sequence in (i), e.g., any 2, 3, 4, 5, 6, 7, 8, or 9 amino acids, e.g., consecutive amino acids, thereof;
[0400] (iii) an amino acid sequence comprising one, two, or three but no more than four modifications, e.g., substitutions (e.g., conservative substitutions), insertions, or deletions, relative to any of the amino acid sequences in (i); or
[0401] (iv) an amino acid sequence comprising one, two, or three but no more than four different amino acids, relative to any one of the amino acid sequences in (i).
[0402] 115. The AAV capsid variant of any one of embodiments 100 or 110-114, wherein [K0]-[K1]-[K2] is or comprises:

(i)
(SEQ ID NO: 692)
TNSSLSYQAEV,
(SEQ ID NO: 693)
TNSSLSYTAEV,
(SEQ ID NO: 696)
TNSSLYYPAEV,
(SEQ ID NO: 697)
TNSSLSYPAEV,
(SEQ ID NO: 698)
TNSSLSYPAEE,
or
(SEQ ID NO: 699)
TNSSLSYPADV;

[0403] (ii) an amino acid sequence comprising any portion of an amino acid sequence in (i), e.g., any 2, 3, 4, 5, 6, 7, 8, 9, or 10 amino acids, e.g., consecutive amino acids, thereof;
[0404] (iii) an amino acid sequence comprising one, two, or three but no more than four modifications, e.g., substitutions (e.g., conservative substitutions), insertions, or deletions, relative to any of the amino acid sequences in (i); or
[0405] (iv) an amino acid sequence comprising one, two, or three but no more than four different amino acids, relative to any one of the amino acid sequences in (i).
[0406] 116. The AAV capsid variant of any one of embodiments 99-115, which further comprises [K3], wherein [K3] comprises positions X_{A}, X_{B}, and X_{C}, wherein:
   [0407] (a) position X_{A} is V;
   [0408] (b) position X_{B} is Q; and
   [0409] (c) position X_{C} is K or N; and
   [0410] optionally wherein the AAV capsid comprises an amino acid modification, e.g., a conservative substitution, of any of the aforesaid amino acids in (a)-(c).
[0411] 117. The AAV capsid variant of embodiment 116, wherein [K3]:
   [0412] (i) comprises VQ, QK, or QN;
   [0413] (ii) is or comprises VQK or VQN.
[0414] 118. The AAV capsid variant of embodiment 100, 116, or 117, wherein [K2]-[K3] is or comprises:

(i)
(SEQ ID NO: 52)
QAEVVQK,
(SEQ ID NO: 49)
TAEVVQK,
(SEQ ID NO: 20)
PAEVVQK,
(SEQ ID NO: 51)
PAEEVQK,
(SEQ ID NO: 594)
PAEVVQN,
or
(SEQ ID NO: 596)
PADVVQK;

[0415] (ii) an amino acid sequence comprising any portion of an amino acid sequence in (i), e.g., any 2, 3, 4, 5, or 6 amino acids, e.g., consecutive amino acids, thereof;
[0416] (iii) an amino acid sequence comprising one, two, or three but no more than four modifications, e.g., substitutions (e.g., conservative substitutions), insertions, or deletions, relative to any of the amino acid sequences in (i); or
[0417] (iv) an amino acid sequence comprising one, two, or three but no more than four different amino acids, relative to any one of the amino acid sequences in (i).
[0418] 119. The AAV capsid variant of embodiment 100 or 116-118, wherein [K1]-[K2]-[K3] is or comprises:

(i)
(SEQ ID NO: 700)
LSYQAEVVQK,
(SEQ ID NO: 701)
LSYTAEVVQK,
(SEQ ID NO: 702)
LYYPAEVVQK,
(SEQ ID NO: 703)
LSYPAEVVQK,
(SEQ ID NO: 704)
LSYPAEEVQK,
(SEQ ID NO: 706)
LSYPAEVVQN,
or
(SEQ ID NO: 708)
LSYPADVVQK;

[0419] (ii) an amino acid sequence comprising any portion of an amino acid sequence in (i), e.g., any 2, 3, 4, 5, 6, 7, 8, or 9 amino acids, e.g., consecutive amino acids, thereof;
[0420] (iii) an amino acid sequence comprising one, two, or three but no more than four modifications, e.g., substitutions (e.g., conservative substitutions), insertions, or deletions, relative to any of the amino acid sequences in (i); or
[0421] (iv) an amino acid sequence comprising one, two, or three but no more than four different amino acids, relative to any one of the amino acid sequences in (i).
[0422] 120. The AAV capsid variant of embodiment 100 or 116-119, wherein [K0]-[K1]-[K2]-[K3] is or comprises:

(i)
(SEQ ID NO: 652)
TNSSLSYQAEVVQK,
(SEQ ID NO: 654)
TNSSLSYTAEVVQK,
(SEQ ID NO: 655)
TNSSLYYPAEVVQK,
(SEQ ID NO: 657)
TNSSLSYPAEVVQK,
(SEQ ID NO: 658)
TNSSLSYPAEEVQK,
(SEQ ID NO: 660)
TNSSLSYPAEVVQN,
or
(SEQ ID NO: 665)
TNSSLSYPADVVQK;

[0423] (ii) an amino acid sequence comprising any portion of an amino acid sequence in (i), e.g., any 2, 3, 4, 5, 6, 7, 8, 9, 10, 11, 12, or 13 amino acids, e.g., consecutive amino acids, thereof;
[0424] (iii) an amino acid sequence comprising one, two, or three but no more than four modifications, e.g., substitutions (e.g., conservative substitutions), insertions, or deletions, relative to any of the amino acid sequences in (i); or
[0425] (iv) an amino acid sequence comprising one, two, or three but no more than four different amino acids, relative to any one of the amino acid sequences in (i).
[0426] 121. The AAV capsid variant of any one of embodiments 99-120, which further comprises [K4], wherein [K4] comprises positions X_{D} and X_{E}, wherein:
   [0427] (a) position X_{D} is T, P, or N; and
   [0428] (b) position X_{E} is A or D; and
   [0429] optionally wherein the AAV capsid variant comprise an amino acid modification, e.g., a conservative substitution, of any of the aforesaid amino acids in (a) or (b).
[0430] 122. The AAV capsid variant of embodiment 100 or 121, wherein [K4] is or comprises TA, TD, PA, or NA.
[0431] 123. The AAV capsid variant of any one of embodiments 100, 121, or 122, wherein [K3]-[K4] is or comprises:

(i)
(SEQ ID NO: 564)
VQKTA,
(SEQ ID NO: 714)
VQKTD,
(SEQ ID NO: 715)
VQNTA,
(SEQ ID NO: 570)
VQKNA,
or
(SEQ ID NO: 567)
VQKPA;

[0432] (ii) an amino acid sequence comprising any portion of an amino acid sequence in (i), e.g., any 2, 3, or 4 amino acids, e.g., consecutive amino acids, thereof;
[0433] (iii) an amino acid sequence comprising one, two, or three but no more than four modifications, e.g., substitutions (e.g., conservative substitutions), insertions, or deletions, relative to any of the amino acid sequences in (i); or
[0434] (iv) an amino acid sequence comprising one, two, or three but no more than four different amino acids, relative to any one of the amino acid sequences in (i).
[0435] 124. The AAV capsid variant of any one of embodiments 100 or 121-123, wherein [K0]-[K1]-[K2]-[K3]-[K4] is or comprises:

(i)
(SEQ ID NO: 2064)
TNSSLSYQAEVVQKTA,
(SEQ ID NO: 2065)
TNSSLSYTAEVVQKTA,
(SEQ ID NO: 2066)
TNSSLYYPAEVVQKTA,
(SEQ ID NO: 2068)
TNSSLSYPAEVVQKTA,
(SEQ ID NO: 2069)
TNSSLSYPAEEVQKTA,
(SEQ ID NO: 2070)
TNSSLSYPAEVVQKTD,
(SEQ ID NO: 2071)
TNSSLSYPAEVVQNTA,
(SEQ ID NO: 2072)
TNSSLSYPAEVVQKNA,
(SEQ ID NO: 2073)
TNSSLSYPAEVVQKPA,
or
(SEQ ID NO: 2076)
TNSSLSYPADVVQKTA;

[0436] (ii) an amino acid sequence comprising any portion of an amino acid sequence in (i), e.g., any 2, 3, 4, 5, 6, 7, 8, 9, 10, 11, 12, 13, 14, or 15 amino acids, e.g., consecutive amino acids, thereof;
[0437] (iii) an amino acid sequence comprising one, two, or three but no more than four modifications, e.g., substitutions (e.g., conservative substitutions), insertions, or deletions, relative to any of the amino acid sequences in (i); or
[0438] (iv) an amino acid sequence comprising one, two, or three but no more than four different amino acids, relative to any one of the amino acid sequences in (i).
[0439] 125. An AAV capsid variant (e.g., an AAV5 capsid variant) comprising [B]-[C], wherein:
   [0440] (i) [B] comprises positions X1, X2, and X3, wherein:
      [0441] (a) position X1 is Q or S;
      [0442] (b) position X2 is S, L, or A; and
      [0443] (c) position X3 is S, Y, or T; and
   [0444] (ii) [C] comprises the amino acid sequence of YPAEVVQK (SEQ ID NO: 943); and
   [0445] optionally wherein there AAV capsid variant comprises an amino acid modification, e.g., a conservative substitution, of any of the aforesaid amino acids in (i) and/or (ii).
[0446] 126. An AAV capsid variant (e.g., an AAV5 capsid variant) comprising one, two, three, four, or all of:
   [0447] (i) an [A] comprising TNN, TNS, TNT, or TNK;
   [0448] (ii) a [B] comprising QSS, SLY, SAT, or SLS;
   [0449] (iii) a [C] comprising YPAEVVQK (SEQ ID NO: 943); and
   [0450] (iv) a [D] comprising TA, TD, NA, or PA; and
   [0451] optionally wherein the AAV capsid variant comprises an amino acid modification, e.g., a conservative substitution, of any of the aforesaid amino acids in (i)-(v), and further optionally wherein [C] replaces position 577 relative to reference sequence numbered according to the amino acid sequence of SEQ ID NO: 138.
[0452] 127. The AAV capsid variant of embodiment 125, comprising wherein [B] comprises QS, SL, SA, LY, AT, LS, or SS.
[0453] 128. The AAV capsid variant of any one of embodiments 125-127, comprising wherein [B] is or comprises QSS, SLY, SAT, or SLS.
[0454] 129. The AAV capsid variant of any one of embodiments 125, 127, or 128, wherein [B]-[C] comprises:

(i)
(SEQ ID NO: 572)
SSYPAEVVQK,
(SEQ ID NO: 702)
LYYPAEVVQK,
(SEQ ID NO: 718)
ATYPAEVVQK,
or
(SEQ ID NO: 703)
LSYPAEVVQK;

[0455] (ii) an amino acid sequence comprising any portion of an amino acid sequence in (i), e.g., any 2, 3, 4, 5, 6, 7, 8, or 9 amino acids, e.g., consecutive amino acids, thereof;
[0456] (iii) an amino acid sequence comprising one, two, or three but no more than four modifications, e.g., substitutions (e.g., conservative substitutions), insertions, or deletions, relative to any of the amino acid sequences in (i); or
[0457] (iv) an amino acid sequence comprising one, two, or three but no more than four different amino acids, relative to any one of the amino acid sequences in (i).
[0458] 130. The AAV capsid variant of any one of embodiments 125-129, wherein [B]-[C] is or comprises:

(i)
(SEQ ID NO: 150)
QSSYPAEVVQK,
(SEQ ID NO: 639)
SLYYPAEVVQK,
(SEQ ID NO: 641)
SATYPAEVVQK,
or
(SEQ ID NO: 642)
SLSYPAEVVQK;

[0459] (ii) an amino acid sequence comprising any portion of an amino acid sequence in (i), e.g., any 2, 3, 4, 5, 6, 7, 8, 9, or 10 amino acids, e.g., consecutive amino acids, thereof;
[0460] (iii) an amino acid sequence comprising one, two, or three but no more than four modifications, e.g., substitutions (e.g., conservative substitutions), insertions, or deletions, relative to any of the amino acid sequences in (i); or
[0461] (iv) an amino acid sequence comprising one, two, or three but no more than four different amino acids, relative to any one of the amino acid sequences in (i).
[0462] 131. The AAV capsid variant of embodiment 126 or 130, wherein [B]-[C] is or comprises QSSYPAEVVQK (SEQ ID NO: 150).
[0463] 132. The AAV capsid variant of any one of embodiments 67-98 or 125-131, which further comprises an amino acid other than N at position 573 (e.g., T, S, or K), relative to a reference sequence numbered according to the amino acid sequence of SEQ ID NO: 138.
[0464] 133. The AAV capsid variant of any one of embodiments 67-98 or 125-131, which further comprises:
   [0465] (i) a T at position 571, an N at position 572, and/or an N at position 573, relative to a reference sequence numbered according to the amino acid sequence of SEQ ID NO: 138;
   [0466] (ii) a T at position 571, an N at position 572, and/or a T at position 573, relative to a reference sequence numbered according to the amino acid sequence of SEQ ID NO: 138;
   [0467] (iii) a T at position 571, an N at position 572, and/or a S at position 573, relative to a reference sequence numbered according to the amino acid sequence of SEQ ID NO: 138; or
   [0468] (iv) a T at position 571, an N at position 572, and/or a K at position 573, relative to a reference sequence numbered according to the amino acid sequence of SEQ ID NO: 138.
[0469] 134. The AAV capsid variant of any one of embodiments 125-133, which further comprises [A], wherein [A] comprises positions X_{A}, X_{B}, and X_{C}, wherein:
   [0470] (a) position X_{A} is T;
   [0471] (b) position X_{B} is N; and
   [0472] (c) position X_{C} is N, T, S, or K; and
   [0473] optionally wherein the AAV capsid variant comprises an amino acid modification, e.g., a conservative substitution, of any of the aforesaid amino acids in (a)-(c).
[0474] 135. The AAV capsid variant of embodiment 126 or 134, wherein [A]:
   [0475] (i) comprises TN, NS, NT, NK, or NN;
   [0476] (ii) is or comprises TNN, TNS, TNT, or TNK.
[0477] 136. The AAV capsid variant of any one of embodiments 126, 134, or 135, wherein [A]-[B] is or comprises:

(i)
(SEQ ID NO: 183)
TNNQSS,
(SEQ ID NO: 648)
TNSSLY,
(SEQ ID NO: 649)
TNTSAT,
(SEQ ID NO: 647)
TNSSLS,
or
(SEQ ID NO: 651)
TNKSAT;

[0478] (ii) an amino acid sequence comprising any portion of an amino acid sequence in (i), e.g., any 2, 3, 4, or 5 amino acids, e.g., consecutive amino acids, thereof;
[0479] (iii) an amino acid sequence comprising one, two, or three but no more than four modifications, e.g., substitutions (e.g., conservative substitutions), insertions, or deletions, relative to any of the amino acid sequences in (i); or
[0480] (iv) an amino acid sequence comprising one, two, or three but no more than four different amino acids, relative to any one of the amino acid sequences in (i).
[0481] 137. The AAV capsid variant of any one of embodiments 126 or 134-136, wherein [A]-[B]-[C] is or comprises:

(i)
(SEQ ID NO: 500)
TNNQSSYPAEVVQK,
(SEQ ID NO: 655)
TNSSLYYPAEVVQK,
(SEQ ID NO: 656)
TNTSATYPAEVVQK,
(SEQ ID NO: 657)
TNSSLSYPAEVVQK,
or
(SEQ ID NO: 663)
TNKSATYPAEVVQK;

[0482] (ii) an amino acid sequence comprising any portion of an amino acid sequence in (i), e.g., any 2, 3, 4, 5, 6, 7, 8, 9, 10, 11, 12, or 13 amino acids, e.g., consecutive amino acids, thereof;
[0483] (iii) an amino acid sequence comprising one, two, or three but no more than four modifications, e.g., substitutions (e.g., conservative substitutions), insertions, or deletions, relative to any of the amino acid sequences in (i); or
[0484] (iv) an amino acid sequence comprising one, two, or three but no more than four different amino acids, relative to any one of the amino acid sequences in (i).
[0485] 138. The AAV capsid variant of any one of embodiments 126 or 134-137, wherein [A]-[B]-[C] is or comprises TNNQSSYPAEVVQK (SEQ ID NO: 500).
[0486] 139. The AAV capsid variant of any one of embodiments 67-98 or 125-138, which further comprises one or both of an amino acid other than T at position 578 (e.g., P or N) and/or an amino acid other than A at position 579 (e.g., D), relative to a reference sequence numbered according to the amino acid sequence of SEQ ID NO: 138.
[0487] 140. The AAV capsid variant of any one of embodiments 67-98 or 125-138, which further comprises:
   [0488] (i) a T at position 578 and/or an A at position 579, relative to a reference sequence numbered according to the amino acid sequence of SEQ ID NO: 138;
   [0489] (ii) a T at position 578 and/or a D at position 579, relative to a reference sequence numbered according to the amino acid sequence of SEQ ID NO: 138;
   [0490] (iii) a P at position 578 and/or an A at position 579, relative to a reference sequence numbered according to the amino acid sequence of SEQ ID NO: 138; or
   [0491] (iv) an N at position 578 and/or an A at position 579, relative to a reference sequence numbered according to the amino acid sequence of SEQ ID NO: 138.
[0492] 141. The AAV capsid variant of any one of embodiments 125-140, which further comprises [D], wherein [D] comprises positions X4 and X5, wherein:
   [0493] (a) position X4 is T, N, or P; and
   [0494] (b) position X5 is A or D; and
   [0495] optionally wherein the AAV capsid variant comprises an amino acid modification, e.g., a conservative substitution, of any of the aforesaid amino acids in (a) or (b).
[0496] 142. The AAV capsid variant of embodiment 141, wherein [D] is or comprises TA, TD, NA, or PA.
[0497] 143. The AAV capsid variant of embodiment 126, 141, or 142, wherein [C]-[D] is or comprises:

(i)
(SEQ ID NO: 584)
YPAEVVQKTA,
(SEQ ID NO: 719)
YPAEVVQKTD,
(SEQ ID NO: 724)
YPAEVVQKNA,
or
(SEQ ID NO: 586)
YPAEVVQKPA;

[0498] (ii) an amino acid sequence comprising any portion of an amino acid sequence in (i), e.g., any 2, 3, 4, 5, 6, 7, 8, or 9 amino acids, e.g., consecutive amino acids, thereof;
[0499] (iii) an amino acid sequence comprising one, two, or three but no more than four modifications, e.g., substitutions (e.g., conservative substitutions), insertions, or deletions, relative to any of the amino acid sequences in (i); or
[0500] (iv) an amino acid sequence comprising one, two, or three but no more than four different amino acids, relative to any one of the amino acid sequences in (i).
[0501] 144. The AAV capsid variant of any one of embodiments 126 or 141-143, wherein [A]-[B]-[C]-[D] is or comprises:

(i)
(SEQ ID NO: 1533)
TNNQSSYPAEVVQKTA,
(SEQ ID NO: 2066)
TNSSLYYPAEVVQKTA,
(SEQ ID NO: 2067)
TNTSATYPAEVVQKTA,
(SEQ ID NO: 2068)
TNSSLSYPAEVVQKTA,
(SEQ ID NO: 2070)
TNSSLSYPAEVVQKTD,
(SEQ ID NO: 2072)
TNSSLSYPAEVVQKNA,
(SEQ ID NO: 2073)
TNSSLSYPAEVVQKPA,
or
(SEQ ID NO: 2075)
TNKSATYPAEVVQKTA;

[0502] (ii) (ii) an amino acid sequence comprising any portion of an amino acid sequence in (i), e.g., any 2, 3, 4, 5, 6, 7, 8, 9, 10, 11, 12, 13, 14, or 15 amino acids, e.g., consecutive amino acids, thereof;
[0503] (iii) an amino acid sequence comprising one, two, or three but no more than four modifications, e.g., substitutions (e.g., conservative substitutions), insertions, or deletions, relative to any of the amino acid sequences in (i); or
[0504] (iv) an amino acid sequence comprising one, two, or three but no more than four different amino acids, relative to any one of the amino acid sequences in (i).
[0505] 145. The AAV capsid variant of any one of embodiments 126 or 141-144, wherein [A]-[B]-[C]-[D] is or comprises TNNQSSYPAEVVQKTA (SEQ ID NO: 1533).
[0506] 146. The AAV capsid variant of any one of the embodiments 1-40, 59, 60, 67-98, 139, or 140, wherein [N2]-[N3] is present in loop VIII, optionally wherein loop VIII comprises positions 571-592 (e.g., amino acids TNNQSSTTAPATGTYNLQEIVP (SEQ ID NO: 736)) numbered according to SEQ ID NO: 138, or positions 571-599, numbered according to SEQ ID NO: 982.
[0507] 147. The AAV capsid variant of any one of embodiments 2, 15-40, 59, 60, 68, 79-98, 139, 137, or 146 wherein [N0], [N1], and/or [N4] is present in loop VIII, optionally wherein loop VIII comprises positions 571-592 (e.g., amino acids TNNQSSTTAPATGTYNLQEIVP (SEQ ID NO: 736)) numbered according to SEQ ID NO: 138, or positions 571-599, numbered according to SEQ ID NO: 982.
[0508] 148. The AAV capsid variant of any one of embodiments 2, 15-40, 59, 60, 68, 79-98, 139, 140, 146, or 147, wherein [N0]-[N1]-[N2]-[N3]-[N4] is present in loop VIII, optionally wherein loop VIII comprises positions 571-592 (e.g., amino acids TNNQSSTTAPATGTYNLQEIVP (SEQ ID NO: 736)) numbered according to SEQ ID NO: 138, or positions 571-599, numbered according to SEQ ID NO: 982.
[0509] 149. The AAV capsid variant of any one of embodiments 1-40, 59, 60, 67-98, 139, 140, or 146-148, wherein [N2] is present immediately subsequent to position 576, relative to a reference sequence numbered according to the amino acid sequence of SEQ ID NO: 138 or 982.
[0510] 150. The AAV capsid variant of any one of embodiments 1-40, 59, 60, 67-98, 139, 140, or 146-149, wherein [N2] replaces position 577 (e.g., T577), relative to a reference sequence numbered according to the amino acid sequence of SEQ ID NO: 138.
[0511] 151. The AAV capsid variant of any one of embodiments 1-40, 59, 60, 67-98, 139, 140, or 146-150, wherein [N2] is present immediately subsequent to position 576, and wherein [N2] replaces position 577 (e.g., T577), relative to a reference sequence numbered according to the amino acid sequence of SEQ ID NO: 138.
[0512] 152. The AAV capsid variant of any one of 1-40, 59, 60, 67-98, 139, 140, or 146-151, wherein [N2] corresponds to positions 577-581 (e.g., Y577, P578, A579, E580, V581) of SEQ ID NO: 982.
[0513] 153. The AAV capsid variant of any one of embodiments 1-152, which comprises an amino acid other than T at position 577, relative to a reference sequence numbered according to the amino acid sequence of SEQ ID NO: 138.
[0514] 154. The AAV capsid variant of any one of embodiments 1-153, which comprises a Y at position 577, relative to a reference sequence numbered according to the amino acid sequence of SEQ ID NO: 138 or 982.
[0515] 155. The AAV capsid variant of any one of embodiments 1-40, 59, 60, 67-98, 139, 140, or 146-154, wherein X1 of [N2] is present at position 577 (e.g., T577), and positions X2-X5 of [N2] are present immediately subsequent to position 577, relative to a reference sequence numbered according to the amino acid sequence of SEQ ID NO: 138 or 982.
[0516] 156. The AAV capsid variant of any one of embodiments 1-40, 59, 60, 67-98, 139, 140, or 146-155, wherein X1 of [N2] corresponds to position 577 (e.g., Y577), X2 of [N2] corresponds to position 578 (e.g., P588), X3 of [N2] corresponds to position 579 (e.g., A579), X4 of [N2] corresponds to position 580 (e.g., E580), and X5 of [N2] corresponds to position 581 (e.g., V581) of SEQ ID NO: 982.
[0517] 157. The AAV capsid variant of any one of embodiments 1-40, 59, 60, 67-98, 139, 140, or 146-156, wherein [N2]-[N3] is present immediately subsequent to position 576, relative to a reference sequence numbered according to the amino acid sequence of SEQ ID NO: 138 or 982.
[0518] 158. The AAV capsid variant of any one of embodiments 1-40, 59, 60, 67-98, 139, 140, or 146-157, wherein [N2]-[N3] replaces position 577 relative to a reference sequence numbered according to the amino acid sequence of SEQ ID NO: 138.
[0519] 159. The AAV capsid variant of any one of embodiments 1-40, 59, 60, 67-98, 139, 140, or 146-158, wherein [N2]-[N3] is present immediately subsequent to position 576, and wherein [N2]-[N3] replaces position 577 (e.g., T577), relative to a reference sequence numbered according to the amino acid sequence of SEQ ID NO: 138.
[0520] 160. The AAV capsid variant of any one of embodiments 1-40, 59, 60, 67-98, 139, 140, or 146-159, wherein [N2]-[N3] corresponds to positions 577-584 (e.g., Y577, P578, A579, E580, V581, V582, Q583, K584) of SEQ ID NO: 982.
[0521] 161. The AAV capsid variant of any one of embodiments 1-40, 59, 60, 67-98, 139, 140, or 146-160, wherein [N2]-[N3]-[N4] is present immediately subsequent to position 576, relative to a reference sequence numbered according to the amino acid sequence of SEQ ID NO: 138 or 982.
[0522] 162. The AAV capsid variant of any one of embodiments 1-40, 59, 60, 67-98, 139, 140, or 146-161, wherein [N2]-[N3]-[N4] replaces positions 577-579 (e.g., T577, T578, and A579), relative to a reference sequence numbered according to the amino acid sequence of SEQ ID NO: 138.
[0523] 163. The AAV capsid variant of any one of embodiments 1-40, 59, 60, 67-98, 139, 140, or 146-162, wherein [N2]-[N3]-[N4] is present immediately subsequent to position 576, and wherein [N2]-[N3]-[N4] replaces positions 577-579 (e.g., T577, T578, and A579), relative to a reference sequence numbered according to the amino acid sequence of SEQ ID NO: 138.
[0524] 164. The AAV capsid variant of any one of embodiments 1-40, 59, 60, 67-98, 139, 140, or 146-163, wherein [N2]-[N3]-[N4] corresponds to positions 577-586 (e.g., Y577, P578, A579, E580, V581, V582, Q583, K584, T585, A586) of SEQ ID NO: 982.
[0525] 165. The AAV capsid variant of any one of embodiments 3, 18-40, 59, 60, 68, 79-98, 139, 140, or 146-164, wherein [N1] is present immediately subsequent to position 573, relative to a reference sequence numbered according to the amino acid sequence of SEQ ID NO: 138 or 982.
[0526] 166. The AAV capsid variant of any one of embodiments 3, 18-40, 59, 60, 68, 79-98, 139, 140, or 146-165, wherein [N1] replaces positions 574-576 (e.g., Q574, S575, and S576), relative to a reference sequence numbered according to the amino acid sequence of SEQ ID NO: 138.
[0527] 167. The AAV capsid variant of any one of embodiments 3, 18-40, 59, 60, 68, 79-98, 139, 140, or 146-166, wherein [N1] is present immediately subsequent to position 573, and wherein [N1] replaces positions 574-576 (e.g., Q574, S575, and S576), relative to a reference sequence numbered according to the amino acid sequence of SEQ ID NO: 138.
[0528] 168. The AAV capsid variant of any one of embodiments 3, 18-40, 59, 60, 68, 79-98, 139, 140, or 146-167, wherein [N1] replaces positions 574-576 (e.g., Q574, S575, and S576), relative to a reference sequence numbered according to the amino acid sequence of SEQ ID NO: 982.
[0529] 169. The AAV capsid variant of any one of embodiments 3, 18-40, 59, 60, 68, 79-98, 139, 140, or 146-168, wherein [N1] is present immediately subsequent to position 573, and wherein [N1] replaces positions 574-576 (e.g., Q574, S575, and S576), relative to a reference sequence numbered according to the amino acid sequence of SEQ ID NO: 982.
[0530] 170. The AAV capsid variant of any one of embodiments 3, 18-40, 59, 60, 68, 79-98, 139, 140, or 146-169, wherein [N1] corresponds to positions 574-576 (e.g., Q574, S575, and S576) of SEQ ID NO: 982.
[0531] 171. The AAV capsid variant of any one of embodiments 3, 18-40, 59, 60, 68, 79-98, 139, 140, or 146-170, wherein [N1]-[N2]-[N3]-[N4] is present immediately subsequent to position 573, relative to a reference sequence numbered according to the amino acid sequence of SEQ ID NO: 138 or 982.
[0532] 172. The AAV capsid variant of any one of embodiments 3, 18-40, 59, 60, 68, 79-98, 139, 140, or 146-171, wherein [N1]-[N2]-[N3]-[N4] replaces positions 574-579 (e.g., Q574, S575, S576, T577, T578, and A579), relative to a reference sequence numbered according to the amino acid sequence of SEQ ID NO: 138.
[0533] 173. The AAV capsid variant of any one of embodiments 3, 18-40, 59, 60, 68, 79-98, 139, 140, or 146-171, wherein [N1]-[N2]-[N3]-[N4] is present immediately subsequent to position 573, and wherein [N1]-[N2]-[N3]-[N4] replaces positions 574-579 (e.g., Q574, S575, S576, T577, T578, and A579), relative to a reference sequence numbered according to the amino acid sequence of SEQ ID NO: 138.
[0534] 174. The AAV capsid variant of any one of embodiments 3, 18-40, 59, 60, 68, 79-98, 139, 140, or 146-173, wherein [N1]-[N2]-[N3]-[N4] corresponds to positions 574-586 (e.g., Q574, S575, S576, Y577, P578, A579, E580, V581, V582, Q583, K584, T585, A586) of SEQ ID NO: 982.
[0535] 175. The AAV capsid variant of any one of embodiments 3, 18-40, 59, 60, 68, 79-98, 139, 140, or 146-174 wherein [N0] is present immediately subsequent to position 570, relative to a reference sequence numbered according to the amino acid sequence of SEQ ID NO: 138.
[0536] 176. The AAV capsid variant of any one of embodiments 3, 18-40, 59, 60, 68, 79-98, 139, 140, or 146-175, wherein [N0] replaces positions 571-573 (e.g., T571, N572, and N573), relative to a reference sequence numbered according to the amino acid sequence of SEQ ID NO: 138.
[0537] 177. The AAV capsid variant of any one of embodiments 3, 18-40, 59, 60, 68, 79-98, 139, 140, or 146-176, wherein [N0] is present immediately subsequent to position 570, and wherein [N0] replaces positions 571-573 (e.g., T571, N572, and N573), relative to a reference sequence numbered according to the amino acid sequence of SEQ ID NO: 138.
[0538] 178. The AAV capsid variant of any one of embodiments 3, 18-40, 59, 60, 68, 79-98, 139, 140, or 146-177 wherein [N0] is present immediately subsequent to position 570, relative to a reference sequence numbered according to the amino acid sequence of SEQ ID NO: 982.
[0539] 179. The AAV capsid variant of any one of embodiments 3, 18-40, 59, 60, 68, 79-98, 139, 140, or 146-178, wherein [N0] replaces positions 571-573 (e.g., T571, N572, and N573), relative to a reference sequence numbered according to the amino acid sequence of SEQ ID NO: 982.
[0540] 180. The AAV capsid variant of any one of embodiments 3, 18-40, 59, 60, 68, 79-98, 139, 140, or 146-179, wherein [N0] is present immediately subsequent to position 570, and wherein [N0] replaces positions 571-573 (e.g., T571, N572, and N573), relative to a reference sequence numbered according to the amino acid sequence of SEQ ID NO: 982.
[0541] 181. The AAV capsid variant of any one of embodiments 3, 18-40, 59, 60, 68, 79-98, 139, 140, or 146-181, wherein [N0] corresponds to positions 571-573 (e.g., T571, N572, and N573) of SEQ ID NO: 982.
[0542] 182. The AAV capsid variant of any one of embodiments 3, 18-40, 59, 60, 68, 79-98, 139, 140, or 146-181, wherein [N0]-[N1]-[N2]-[N3]-[N4] is present immediately subsequent to position 570, relative to a reference sequence numbered according to the amino acid sequence of SEQ ID NO: 138 or 982.
[0543] 183. The AAV capsid variant of any one of embodiments 3, 18-40, 59, 60, 68, 79-98, 139, 140, or 146-182, wherein [N0]-[N1]-[N2]-[N3]-[N4] replaces positions 571-579 (e.g., T571, N572, N573, Q574, S575, S576, T577, T578, and A579), relative to a reference sequence numbered according to the amino acid sequence of SEQ ID NO: 138.
[0544] 184. The AAV capsid variant of any one of embodiments 3, 18-40, 59, 60, 68, 79-98, 139, 140, or 146-183, wherein [N0]-[N1]-[N2]-[N3]-[N4] is present immediately subsequent to position 570, and wherein [N0]-[N1]-[N2]-[N3]-[N4] replaces positions 571-579 (e.g., T571, N572, N573, Q574, S575, S576, T577, T578, and A579), relative to a reference sequence numbered according to the amino acid sequence of SEQ ID NO: 138.
[0545] 185. The AAV capsid variant of any one of embodiments 3, 18-40, 59, 60, 68, 79-98, 139, 140, or 146-184, wherein [N0]-[N1]-[N2]-[N3]-[N4] corresponds to positions 571-586 (e.g., T571, N572, N573, Q574, S575, S576, Y577, P578, A579, E580, V581, V582, Q583, K584, T585, A586), of SEQ ID NO: 982.
[0546] 186. The AAV capsid variant of any one of embodiments 3, 31-40, 68, 94-98, 139, 140, or 146-185, wherein [N4] is present immediately subsequent to position 584, numbered according to SEQ ID NO: 982.
[0547] 187. The AAV capsid variant of any one of embodiments 3, 31-40, 68, 94-98, 139, 140, or 146-186, wherein [N4] replaces position 578 and 579, numbered according to SEQ ID NO: 138; or positions 585 and 586 numbered according to SEQ ID NO: 982.
[0548] 188. The AAV capsid variant of any one of embodiments 3, 31-40, 68, 94-98, 139, 140, or 146-187, wherein [N4] is present immediately subsequent to position 584 and replaces positions 585 and 586 numbered according to SEQ ID NO: 982.
[0549] 189. The AAV capsid variant of any one of embodiments 3, 31-40, 68, 94-98, 139, 140, or 146-188, wherein:
   [0550] (i) X_{A} of [N0] is present at position 571, X_{B} of [N0] is present at position 572, and X_{C} of [N0] is present at position 573, numbered according to SEQ ID NO: 982;
   [0551] (ii) X_{D} of [N1] is present at position 574, X_{E} of [N1] is present at position 575, and X_{F} of [N1] is present at position 576, numbered according to SEQ ID NO: 982;
   [0552] (iii) X1 of [N2] is present at position 577, X2 of [N2] is present at position 578, X3 of [N2] is present at position 579, X4 of [N2] is present at position 580, and X5 of [N2] is present at position 581, numbered according to SEQ ID NO: 982;
   [0553] (iv) [N3] is present at positions 582-584, numbered according to SEQ ID NO: 982; and/or
   [0554] (v) X_{G} of [N4] is present at position 585 and X_{H} of [N4] is present at position 586, numbered according to SEQ ID NO: 982.
[0555] 190. The AAV capsid variant of any one of embodiments 3, 31-40, 68, 94-98, 139, 140, or 146-189, wherein:
   [0556] (i) [N0] is present at positions 571-573, numbered according to SEQ ID NO: 982;
   [0557] (ii) [N1] is present at positions 574-576, numbered according to SEQ ID NO: 982;
   [0558] (iii) [N2] is present at positions 577-581, numbered according to SEQ ID NO: 982;
   [0559] (iv) [N3] is present at positions 582-584, numbered according to SEQ ID NO: 982;
   [0560] (v) [N4] is present at positions 585-586, numbered according to SEQ ID NO: 982;
   [0561] (vi) [N2]-[N3] is present at positions 577-584, numbered according to SEQ ID NO: 982;
[0562] and/or
   [0563] (vii) [N0]-[N1]-[N2]-[N3]-[N4] is present at positions 571-586, numbered according to SEQ ID NO: 982.
[0564] 191. The AAV capsid variant of any one of embodiments 1-40, 59, 60, 67-98, 139, 140, or 146-190, wherein [N3] is present immediately subsequent to [N2].
[0565] 192. The AAV capsid variant of any one of embodiments 3, 31-40, 68, 94-98, 139, 140, or 146-191, wherein [N4] is present immediately subsequent to [N3].
[0566] 193. The AAV capsid variant of any one of embodiments 1-40, 59, 60, 67-98, 139, 140, or 146-192, which comprises from N-terminus to C-terminus [N2]-[N3].
[0567] 194. The AAV capsid variant of any one of embodiments 1-40, 59, 60, 67-98, 139, 140, or 146-193, which comprises from N-terminus to C-terminus [N1]-[N2]-[N3].
[0568] 195. The AAV capsid variant of any one of embodiments 3, 18, 19, 28-40, 59, 60, 68, 89-98, 139, 140, or 146-194, which comprises from N-terminus to C-terminus [N0]-[N1]-[N2]-[N3].
[0569] 196. The AAV capsid variant of any one of embodiments 3, 18-40, 59, 60, 68, 79-98, 139, 140, or 146-195, which comprises from N-terminus to C-terminus [N1]-[N2]-[N3]-[N4].
[0570] 197. The AAV capsid variant of any one of embodiments 3, 18, 19, 28-40, 59, 60, 68, 89-98, 139, 140, or 146-196, which comprises from N-terminus to C-terminus [N0]-[N1]-[N2]-[N3]-[N4].
[0571] 198. The AAV capsid variant of any one of embodiments 41-66 or 125-145, wherein [B]-[C] is present in loop VIII, optionally wherein loop VIII comprises positions 571-592 (e.g., amino acids TNNQSSTTAPATGTYNLQEIVP (SEQ ID NO: 736)) numbered according to SEQ ID NO: 138, or positions 571-599, numbered according to SEQ ID NO: 982.
[0572] 199. The AAV capsid variant of any one of embodiments 42, 52-66, 126, 134-145, or 198, wherein [A] and/or [D] is present in loop VIII, optionally wherein loop VIII comprises positions 571-592 (e.g., amino acids TNNQSSTTAPATGTYNLQEIVP (SEQ ID NO: 736)) numbered according to SEQ ID NO: 138, or positions 571-599, numbered according to SEQ ID NO: 982.
[0573] 200. The AAV capsid variant of any one of embodiments 42, 52-66, 126, 134-145, 198, or 199, wherein [A]-[B]-[C]-[D] is present in loop VIII, optionally wherein loop VIII comprises positions 571-592 (e.g., amino acids TNNQSSTTAPATGTYNLQEIVP (SEQ ID NO: 736)) numbered according to SEQ ID NO: 138, or positions 571-599, numbered according to SEQ ID NO: 982.
[0574] 201. The AAV capsid variant of any one of embodiments 41-66, 125-145, or 198-200, wherein [B] is present immediately subsequent to position 573, relative to a reference sequence numbered according to the amino acid sequence of SEQ ID NO: 138.
[0575] 202. The AAV capsid variant of any one of embodiments 41-66, 125-145, or 198-201, wherein [B] replaces positions 574-576 (e.g., Q574, S575, and S576), relative to a reference sequence numbered according to the amino acid sequence of SEQ ID NO: 138.
[0576] 203. The AAV capsid variant of any one of embodiments 41-66, 125-145, or 198-202, wherein [B] is present immediately subsequent to position 573, and wherein [B] replaces positions 574-576 (e.g., Q574, S575, and S576), relative to a reference sequence numbered according to the amino acid sequence of SEQ ID NO: 138.
[0577] 204. The AAV capsid variant of any one of embodiments 41-66, 125-145, or 198-203, wherein [B] is present immediately subsequent to position 573, relative to a reference sequence numbered according to the amino acid sequence of SEQ ID NO: 982.
[0578] 205. The AAV capsid variant of any one of embodiments 41-66, 125-145, or 198-204, wherein [B] replaces positions 574-576 (e.g., Q574, S575, and S576), relative to a reference sequence numbered according to the amino acid sequence of SEQ ID NO: 982.
[0579] 206. The AAV capsid variant of any one of embodiments 41-66, 125-145, or 198-205, wherein [B] is present immediately subsequent to position 573, and wherein [B] replaces positions 574-576 (e.g., Q574, S575, and S576), relative to a reference sequence numbered according to the amino acid sequence of SEQ ID NO: 982.
[0580] 207. The AAV capsid variant of any one of embodiments 41-66, 125-145, or 198-206, wherein [B] corresponds to positions 574-576 (e.g., Q574, S575, and S576) of SEQ ID NO: 982.
[0581] 208. The AAV capsid variant of any one of embodiments 41-66, 125-145, or 198-207, wherein [B]-[C] is present immediately subsequent to position 573, relative to a reference sequence numbered according to the amino acid sequence of SEQ ID NO: 138 or 982.
[0582] 209. The AAV capsid variant of any one of embodiments 41-66, 125-145, or 198-208, wherein [B]-[C] replaces positions 574-577 (e.g., Q574, S575, S576, and T577), relative to a reference sequence numbered according to the amino acid sequence of SEQ ID NO: 138.
[0583] 210. The AAV capsid variant of any one of embodiments 41-66, 125-145, or 198-209, wherein [B]-[C] is present immediately subsequent to position 573, and wherein [B]-[C] replaces positions 574-577 (e.g., Q574, S575, S576, and T577), relative to a reference sequence numbered according to the amino acid sequence of SEQ ID NO: 138.
[0584] 211. The AAV capsid variant of any one of embodiments 41-66, 125-145, or 198-210, wherein [B]-[C] corresponds to positions 574-584 (e.g., Q574, S575, S576, Y577, P578, A579, E580, V581, V582, Q583, K584) of SEQ ID NO: 982.
[0585] 212. The AAV capsid variant of any one of embodiments 41-66, 125-145, or 198-211, wherein [B]-[C]-[D] is present immediately subsequent to position 573, relative to a reference sequence numbered according to the amino acid sequence of SEQ ID NO: 138 or 982.
[0586] 213. The AAV capsid variant of any one of embodiments 41-66, 125-145, or 198-212, wherein [B]-[C]-[D] replaces positions 574-579 (e.g., Q574, S575, S576, T577, T578, and A579), relative to a reference sequence numbered according to the amino acid sequence of SEQ ID NO: 138.
[0587] 214. The AAV capsid variant of any one of embodiments 41-66, 125-145, or 198-213, wherein [B]-[C]-[D] is present immediately subsequent to position 573, and wherein [B]-[C]-[D] replaces positions 574-579 (e.g., Q574, S575, S576, T577, T578, and A579), relative to a reference sequence numbered according to the amino acid sequence of SEQ ID NO: 138.
[0588] 215. The AAV capsid variant of any one of embodiments 41-66, 125-145, or 198-214, wherein [B]-[C]-[D] corresponds to positions 574-586 (e.g., Q574, S575, S576, Y577, P578, A579, E580, V581, V582, Q583, K584, T585, A586) of SEQ ID NO: 982.
[0589] 216. The AAV capsid variant of any one of embodiments 41-66, 125-145, or 198-215, wherein [C] is present immediately subsequent to position 576, relative to a reference sequence numbered according to the amino acid sequence of SEQ ID NO: 138.
[0590] 217. The AAV capsid variant of any one of embodiments 41-66, 125-145, or 198-216, wherein [C] replaces position 577 (e.g., T577), relative to a reference sequence numbered according to the amino acid sequence of SEQ ID NO: 138.
[0591] 218. The AAV capsid variant of any one of embodiments 41-66, 125-145, or 198-217, wherein [C] is present immediately subsequent to position 576, and wherein [C] replaces 577 (e.g., T577), relative to a reference sequence numbered according to the amino acid sequence of SEQ ID NO: 138.
[0592] 219. The AAV capsid variant of any one of embodiments 41-66, 125-145, or 198-218, wherein [C] corresponds to positions 577-584 (e.g., Y577, P578, A579, E580, V581, V582, Q583, K584) of SEQ ID NO: 982.
[0593] 220. The AAV capsid variant of any one of embodiments 42, 52-66, 126, 134-145, or 198-219, wherein [A] is present immediately subsequent to position 570, relative to a reference sequence numbered according to the amino acid sequence of SEQ ID NO: 138.
[0594] 221. The AAV capsid variant of any one of embodiments 42, 52-66, 126, 134-145, or 198-220, wherein [A] replaces positions 571-573 (e.g., T571, N572, and N573), relative to a reference sequence numbered according to the amino acid sequence of SEQ ID NO: 138.
[0595] 222. The AAV capsid variant of any one of embodiments 42, 52-66, 126, 134-145, or 198-221, wherein [A] is present immediately subsequent to position 570, and wherein [A] replaces positions 571-573 (e.g., T571, N572, and N573), relative to a reference sequence numbered according to the amino acid sequence of SEQ ID NO: 138.
[0596] 223. The AAV capsid variant of any one of embodiments 42, 52-66, 126, 134-145, or 198-222, wherein [A] is present immediately subsequent to position 570, relative to a reference sequence numbered according to the amino acid sequence of SEQ ID NO: 982.
[0597] 224. The AAV capsid variant of any one of embodiments 42, 52-66, 126, 134-145, or 198-223, wherein [A] replaces positions 571-573 (e.g., T571, N572, and N573), relative to a reference sequence numbered according to the amino acid sequence of SEQ ID NO: 982.
[0598] 225. The AAV capsid variant of any one of embodiments 42, 52-66, 126, 134-145, or 198-224, wherein [A] is present immediately subsequent to position 570, and wherein [A] replaces positions 571-573 (e.g., T571, N572, and N573), relative to a reference sequence numbered according to the amino acid sequence of SEQ ID NO: 982.
[0599] 226. The AAV capsid variant of any one of embodiments 42, 52-66, 126, 134-145, or 198-225, wherein [A] corresponds to positions 571-573 (e.g., T571, N572, and N573) of SEQ ID NO: 982.
[0600] 227. The AAV capsid variant of any one of embodiments 42, 52-66, 126, 134-145, or 198-226, wherein [D] is present immediately subsequent to position 584, numbered according to SEQ ID NO: 982.
[0601] 228. The AAV capsid variant of any one of embodiments 42, 52-66, 126, 134-145, or 198-227, wherein [D] replaces positions 578 and 579 numbered according to SEQ ID NO: 138; or positions 585 and 586, numbered according to SEQ ID NO: 982.
[0602] 229. The AAV capsid variant of any one of embodiments 42, 52-66, 126, 134-145, or 198-228, wherein [D] is present immediately subsequent to position 584 and replaces positions 585 and 586, numbered according to SEQ ID NO: 982.
[0603] 230. The AAV capsid variant of any one of embodiments 42, 52-66, 126, 134-145, or 198-229, wherein [A]-[B]-[C]-[D] is present immediately subsequent to position 570, relative to a reference sequence numbered according to the amino acid sequence of SEQ ID NO: 138 or 982.
[0604] 231. The AAV capsid variant of any one of embodiments 42, 52-66, 126, 134-145, or 198-230, wherein [A]-[B]-[C]-[D] replaces positions 571-579 (e.g., T571, N572, N573, Q574, S575, S576, T577, T578, and A579), relative to a reference sequence numbered according to the amino acid sequence of SEQ ID NO: 138.
[0605] 232. The AAV capsid variant of any one of embodiments 42, 52-66, 126, 134-145, or 198-231, wherein [A]-[B]-[C]-[D] is present immediately subsequent to position 570, and wherein [A]-[B]-[C]-[D] replaces positions 571-579 (e.g., T571, N572, N573, Q574, S575, S576, T577, T578, and A579), relative to a reference sequence numbered according to the amino acid sequence of SEQ ID NO: 138.
[0606] 233. The AAV capsid variant of any one of embodiments 42, 52-66, 126, 134-145, or 198-232, wherein [A]-[B]-[C]-[D] corresponds to positions 571-586 (e.g., T571, N572, N573, Q574, S575, S576, Y577, P578, A579, E580, V581, V582, Q583, K584, T585, A586) of SEQ ID NO: 982.
[0607] 234. The AAV capsid variant of any one of embodiments 42, 52-66, 126, 134-145, or 198-233, wherein:
   [0608] (i) X_{A} of [A] is present at position 571, X_{B} of [A] is present at position 572, and X_{C} of [A] is present at position 573, numbered according to SEQ ID NO: 982;
   [0609] (ii) X1 of [B] is present at position 574, X2 of [B] is present at position 575, and X3 of [B] is present at position 576, numbered according to SEQ ID NO: 982;
   [0610] (iii) [C] is present at positions 577-584, numbered according to SEQ ID NO: 982; and/or
   [0611] (iv) X4 of [D] is present at position 585 and position X5 of [D] is present at position 586, numbered according to SEQ ID NO: 982.
[0612] 235. The AAV capsid variant of any one of embodiments 42, 52-66, 126, 134-145, or 198-234, wherein:
   [0613] (i) [A] is present at positions 571-573, numbered according to SEQ ID NO: 982;
   [0614] (ii) [B] is present at positions 574-576, numbered according to SEQ ID NO: 982;
   [0615] (iii) [C] is present at positions 577-584, numbered according to SEQ ID NO: 982;
   [0616] (iv) [D] is present at positions 585-586, numbered according to SEQ ID NO: 982; and/or
   [0617] (v) [A]-[B]-[C]-[D] is present at positions 571-586, numbered according to SEQ ID NO: 982.
[0618] 236. The AAV capsid variant of any one of embodiments 41-66, 125-145, or 198-235, wherein [C] is present immediately subsequent to [B].
[0619] 237. The AAV capsid variant of any one of embodiments 42, 61-66, 126, 141-145, or 198-236 wherein [D] is present immediately subsequent to [C].
[0620] 238. The AAV capsid variant of any one of embodiments 41-66, 125-145, or 198-237, which comprises from N-terminus to C-terminus [B]-[C].
[0621] 239. The AAV capsid variant of any one of embodiments 42, 52-66, 126, 134-145, or 198-238, which comprises from N-terminus to C-terminus [A]-[B]-[C].
[0622] 240. The AAV capsid variant of any one of embodiments 42, 61-66, 126, 141-145, or 198-239, which comprises from N-terminus to C-terminus [B]-[C]-[D].
[0623] 241. The AAV capsid variant of any one of embodiments 42, 61-66, 126, 141-145, or 198-240, which comprises from N-terminus to C-terminus [A]-[B]-[C]-[D].
[0624] 242. The AAV capsid variant of any one of the embodiments 99-124, wherein [K1]-[K2] is present in loop VIII.
[0625] 243. The AAV capsid variant of any one of embodiments 100, 92-124, or 242, wherein [K0], [K3], and/or [K4] is present in loop VIII, optionally wherein loop VIII comprises positions 571-592 (e.g., amino acids TNNQSSTTAPATGTYNLQEIVP (SEQ ID NO: 736)) numbered according to SEQ ID NO: 138, or positions 571-599, numbered according to SEQ ID NO: 982.
[0626] 244. The AAV capsid variant of any one of embodiments 100, 92-124, 242, or 243, wherein [K0]-[K1]-[K2]-[K3]-[K4] is present in loop VIII, optionally wherein loop VIII comprises positions 571-592 (e.g., amino acids TNNQSSTTAPATGTYNLQEIVP (SEQ ID NO: 736)) numbered according to SEQ ID NO: 138, or positions 571-599, numbered according to SEQ ID NO: 982.
[0627] 245. The AAV capsid variant of any one of embodiments 99-124 or 242-244, wherein [K1] is present immediately subsequent to position 574, relative to a reference sequence numbered according to the amino acid sequence of SEQ ID NO: 138.
[0628] 246. The AAV capsid variant of any one of embodiments 99-124 or 242-245, wherein [K1] replaces positions 575-577 (e.g., S575, S576, and T577), relative to a reference sequence numbered according to the amino acid sequence of SEQ ID NO: 138.
[0629] 247. The AAV capsid variant of any one of embodiments 99-124 or 242-246, wherein [K1] is present immediately subsequent to position 574, and wherein [K1] replaces positions 575-577 (e.g., S575, S576, and T577), relative to a reference sequence numbered according to the amino acid sequence of SEQ ID NO: 138.
[0630] 248. The AAV capsid variant of any one of embodiments 100, 116-124, or 242-247, wherein [K1]-[K2]-[K3] is present immediately subsequent to position 574, relative to a reference sequence numbered according to the amino acid sequence of SEQ ID NO: 138.
[0631] 249. The AAV capsid variant of any one of embodiments 100, 116-124, or 242-248, wherein [K1]-[K2]-[K3] replaces positions 575-577 (e.g., S575, S576, and T577), relative to a reference sequence numbered according to the amino acid sequence of SEQ ID NO: 138.
[0632] 250. The AAV capsid variant of any one of embodiments 100, 116-124, or 242-249, wherein [K1]-[K2]-[K3] is present immediately subsequent to position 574, and wherein [K1]-[K2]-[K3] replaces positions 575-577 (e.g., S575, S576, and T577), relative to a reference sequence numbered according to the amino acid sequence of SEQ ID NO: 138.
[0633] 251. The AAV capsid variant of any one of embodiments 100, 121-124, or 242-250, wherein [K1]-[K2]-[K3]-[K4] is present immediately subsequent to position 574, relative to a reference sequence numbered according to the amino acid sequence of SEQ ID NO: 138.
[0634] 252. The AAV capsid variant of any one of embodiments 100, 121-124, or 242-251, wherein [K1]-[K2]-[K3]-[K4] replaces positions 575-579 (e.g., S575, S576, T577, T578, and A579), relative to a reference sequence numbered according to the amino acid sequence of SEQ ID NO: 138.
[0635] 253. The AAV capsid variant of any one of embodiments 100, 121-124, or 242-252, wherein [K1]-[K2]-[K3]-[K4] is present immediately subsequent to position 574, and wherein [K1]-[K2]-[K3]-[K4] replaces positions 575-579 (e.g., S575, S576, T577, T578, and A579), relative to a reference sequence numbered according to the amino acid sequence of SEQ ID NO: 138.
[0636] 254. The AAV capsid variant of any one of embodiments 100, 110-124, or 242-253, wherein [K0] is present immediately subsequent to position 570, relative to a reference sequence numbered according to the amino acid sequence of SEQ ID NO: 138.
[0637] 255. The AAV capsid variant of any one of embodiments 100, 110-124, or 242-254, wherein [K0] replaces positions 571 to 574 (e.g., T571, N572, N573, and Q574), relative to a reference sequence numbered according to the amino acid sequence of SEQ ID NO: 138.
[0638] 256. The AAV capsid variant of any one of embodiments 100, 110-124, or 242-255, wherein [K0] is present immediately subsequent to position 570, and wherein [K0] replaces positions 571 to 574 (e.g., T571, N572, N573, and Q574), relative to a reference sequence numbered according to the amino acid sequence of SEQ ID NO: 138.
[0639] 257. The AAV capsid variant of any one of embodiments 100, 121-124, or 242-256, wherein [K0]-[K1]-[K2]-[K3]-[K4] is present immediately subsequent to position 570, relative to a reference sequence numbered according to the amino acid sequence of SEQ ID NO: 138.
[0640] 258. The AAV capsid variant of any one of embodiments 100, 121-124, or 242-257, wherein [K0]-[K1]-[K2]-[K3]-[K4] replaces positions 571-579 (e.g., T571, N572, N573, Q574, S575, S576, T577, T578, and A579), relative to a reference sequence numbered according to the amino acid sequence of SEQ ID NO: 138.
[0641] 259. The AAV capsid variant of any one of embodiments 100, 121-124, or 242-258, wherein [K0]-[K1]-[K2]-[K3]-[K4] is present immediately subsequent to position 570, and wherein [K0]-[K1]-[K2]-[K3]-[K4] replaces positions 571-579 (e.g., T571, N572, N573, Q574, S575, S576, T577, T578, and A579), relative to a reference sequence numbered according to the amino acid sequence of SEQ ID NO: 138.
[0642] 260. The AAV capsid variant of any one of embodiments 100, 116-124, or 242-259, wherein [K3] is present immediately subsequent [K2].
[0643] 261. The AAV capsid variant of any one of embodiments 100, 121-124, or 242-260, wherein [K4] is present immediately subsequent [K3].
[0644] 262. The AAV capsid variant of any one of embodiments 100, 121-124, or 242-261, which comprises from N-terminus to C-terminus [K1]-[K2].
[0645] 263. The AAV capsid variant of any one of embodiments 100, 116-124, or 242-262, which comprises from N-terminus to C-terminus [K1]-[K2]-[K3].
[0646] 264. The AAV capsid variant of any one of embodiments 100, 116-124, or 242-263, which comprises from N-terminus to C-terminus [K0]-[K1]-[K2]-[K3].
[0647] 265. The AAV capsid variant of any one of embodiments 100, 121-124, or 242-264, which comprises from N-terminus to C-terminus [K1]-[K2]-[K3]-[K4].
[0648] 266. The AAV capsid variant of any one of embodiments 100, 121-124, or 242-265, which comprises from N-terminus to C-terminus [K0]-[K1]-[K2]-[K3]-[K4].
[0649] 267. An AAV capsid variant (e.g., an AAV5 capsid variant) comprising:
   [0650] (a) the amino acid sequence of any of the sequences provided in Tables 1, 2A, 2B, 9, or 15-20;
   [0651] (b) an amino acid sequence comprising at least 3, 4, 5, 6, 7, 8, 9, 10, 11, 12, 13, 14, or 15 consecutive amino acids from any one of the sequences provided in Tables 1, 2A, 2B, 9, or 15-20;
   [0652] (c) an amino acid sequence comprising one, two, or three but no more than four different amino acids, relative to the amino acid sequence of any one of the amino acid sequences provided in Tables 1, 2A, 2B, 9, or 15-20; or
   [0653] (d) an amino sequence comprising one, two, or three but no more than four modifications, e.g., substitutions (e.g., conservative substitutions), insertions, or deletions, relative to the amino acid sequence of any one of the amino acid sequences provided in Tables 1, 2A, 2B, 9, or 15-20.
[0654] 268. An AAV capsid variant (e.g., an AAV5 capsid variant) comprising:
   [0655] (a) the amino acid sequence of any of SEQ ID NOs: 943, 1021, 1024, 1027, 1112, 1142, 1214, 1232, 1254, 1300, 1310, 1327, 1331, 1342, 1419, 1453, 1533, 1538, 1539, 1575, 1578, 1583-1587, 1590, 1591-1593, 1598-1608, or 1610-1624;
   [0656] (b) an amino acid sequence comprising at least 3, 4, 5, 6, 7, 8, 9, 10, 11, 12, 13, 14, or 15 consecutive amino acids from any one of SEQ ID NOs: 943, 1021, 1024, 1027, 1112, 1142, 1214, 1232, 1254, 1300, 1310, 1327, 1331, 1342, 1419, 1453, 1533, 1538, 1539, 1575, 1578, 1583-1587, 1590, 1591-1593, 1598-1608, or 1610-1624;
   [0657] (c) an amino acid sequence comprising one, two, or three but no more than four different amino acids, relative to the amino acid sequence of any one of SEQ ID NOs: 943, 1021, 1024, 1027, 1112, 1142, 1214, 1232, 1254, 1300, 1310, 1327, 1331, 1342, 1419, 1453, 1533, 1538, 1539, 1575, 1578, 1583-1587, 1590, 1591-1593, 1598-1608, or 1610-1624; or
   [0658] (d) an amino sequence comprising one, two, or three but no more than four modifications, e.g., substitutions (e.g., conservative substitutions), insertions, or deletions, relative to the amino acid sequence of any one of SEQ ID NOs: 943, 1021, 1024, 1027, 1112, 1142, 1214, 1232, 1254, 1300, 1310, 1327, 1331, 1342, 1419, 1453, 1533, 1538, 1539, 1575, 1578, 1583-1587, 1590, 1591-1593, 1598-1608, or 1610-1624.
[0659] 269. An AAV capsid variant (e.g., an AAV5 capsid variant) comprising:
   [0660] (a) the amino acid sequence of any of SEQ ID NOs: 943 or 2064-2080;
   [0661] (b) an amino acid sequence comprising at least 3, 4, 5, 6, 7, 8, 9, 10, 11, 12, 13, 14, or 15 consecutive amino acids from any one of SEQ ID NOs: 943 or 2064-2080;
   [0662] (c) an amino acid sequence comprising one, two, or three but no more than four different amino acids, relative to the amino acid sequence of any one of SEQ ID NOs: 943 or 2064-2080; or
   [0663] (d) an amino sequence comprising one, two, or three but no more than four modifications, e.g., substitutions (e.g., conservative substitutions), insertions, or deletions, relative to the amino acid sequence of any one of SEQ ID NOs: 943 or 2064-2080.
[0664] 270. An AAV capsid variant (e.g., an AAV5 capsid variant) comprising:
   [0665] (a) the amino acid sequence of any of SEQ ID NOs: 1021, 1024, 1232, 1300, 1327, 1533, 1538, 1585, 1590, or 1591;
   [0666] (b) an amino acid sequence comprising at least 3, 4, 5, 6, 7, 8, 9, 10, 11, 12, 13, 14, or 15 consecutive amino acids from any one of SEQ ID NOs: 1021, 1024, 1232, 1300, 1327, 1533, 1538, 1585, 1590, or 1591;
   [0667] (c) an amino acid sequence comprising one, two, or three but no more than four different amino acids, relative to the amino acid sequence of any one of SEQ ID NOs: 1021, 1024, 1232, 1300, 1327, 1533, 1538, 1585, 1590, or 1591; or
   [0668] (d) an amino sequence comprising one, two, or three but no more than four modifications, e.g., substitutions (e.g., conservative substitutions), insertions, or deletions, relative to the amino acid sequence of any one of SEQ ID NOs: 1021, 1024, 1232, 1300, 1327, 1533, 1538, 1585, 1590, or 1591.
[0669] 271. The AAV capsid variant of any one of embodiments 267-270, which comprises at least 3, 4, 5, 6, or 7 consecutive amino acids from of any one of SEQ ID NOs: 943 or 946-966.
[0670] 272. The AAV capsid variant of embodiment 267-271, wherein the 3 consecutive amino acids comprise YPA.
[0671] 273. The AAV capsid variant of embodiment 267-272, wherein the 4 consecutive amino acids comprise YPAE (SEQ ID NO: 21).
[0672] 274. The AAV capsid variant of embodiment 267-273, wherein the 5 consecutive amino acids comprise YPAEV (SEQ ID NO: 1).
[0673] 275. The AAV capsid variant of embodiment 267-274, wherein the 6 consecutive amino acids comprise YPAEVV (SEQ ID NO: 725).
[0674] 276. The AAV capsid variant of embodiment 267-275, wherein the 7 consecutive amino acids comprise YPAEVVQ (SEQ ID NO: 726).
[0675] 277. The AAV capsid variant of embodiment 267-276, wherein the amino acid sequence comprises YPAEVVQK (SEQ ID NO: 943).
[0676] 278. The AAV capsid variant of any one of embodiments 267, 268, or 270, wherein:
   [0677] (i) the 3 consecutive amino acids comprise YTP;
   [0678] (ii) the 4 consecutive amino acids comprise YTPS (SEQ ID NO: 26);
   [0679] (iii) the 5 consecutive amino acids comprise YTPSL (SEQ ID NO: 7);
   [0680] (iv) the 6 consecutive amino acids comprise YTPSLV (SEQ ID NO: 727);
   [0681] (v) the 7 consecutive amino acids comprise YTPSLVQ (SEQ ID NO: 728); and/or
   [0682] (vi) the amino acid sequence comprises YTPSLVQK (SEQ ID NO: 952).
[0683] 279. The AAV capsid variant of any one of embodiments 267, 268, or 270, wherein:
   [0684] (i) the 3 consecutive amino acids comprise YPP;
   [0685] (ii) the 4 consecutive amino acids comprise YPPS (SEQ ID NO: 22);
   [0686] (iii) the 5 consecutive amino acids comprise YPPSL (SEQ ID NO: 2);
   [0687] (iv) the 6 consecutive amino acids comprise YPPSLV (SEQ ID NO: 729);
   [0688] (v) the 7 consecutive amino acids comprise YPPSLVQ (SEQ ID NO: 732); and/or
   [0689] (vi) the amino acid sequence comprises YPPSLVQK (SEQ ID NO: 946).
[0690] 280. The AAV capsid variant of any one of embodiments 267, 268, or 270, wherein:
   [0691] (i) the 3 consecutive amino acids comprise YPP;
   [0692] (ii) the 4 consecutive amino acids comprise YPPS (SEQ ID NO: 22);
   [0693] (iii) the 5 consecutive amino acids comprise YPPSL (SEQ ID NO: 2);
   [0694] (iv) the 6 consecutive amino acids comprise YPPSLE (SEQ ID NO: 733);
   [0695] (v) the 7 consecutive amino acids comprise YPPSLEQ (SEQ ID NO: 734); and/or
   [0696] (vi) the amino acid sequence comprises YPPSLEQK (SEQ ID NO: 953).
[0697] 281. The AAV capsid variant of any one of embodiments 267, 268, or 270, wherein:
   [0698] (i) the 3 consecutive amino acids comprise YPP;
   [0699] (ii) the 4 consecutive amino acids comprise YPPS (SEQ ID NO: 22);
   [0700] (iii) the 5 consecutive amino acids comprise YPPSL (SEQ ID NO: 2);
   [0701] (iv) the 6 consecutive amino acids comprise YPPSLV (SEQ ID NO: 729);
   [0702] (v) the 7 consecutive amino acids comprise YPPSLVK (SEQ ID NO: 735); and/or
   [0703] (vi) the amino acid sequence comprises YPPSLVKK (SEQ ID NO: 954).
[0704] 282. The AAV capsid variant of any one of embodiments 267-277, which comprises an amino acid sequence comprising one, two, or three but no more than four different amino acids, relative to the amino acid sequence of YPAEVVQK (SEQ ID NO: 943).
[0705] 283. The AAV capsid variant of any one of embodiments 267, 268, 270, or 278-281, which comprises an amino acid sequence comprising one, two, or three but no more than four different amino acids, relative to the amino acid sequence of any of SEQ ID NOs: 1021, 1024, 1232, 1300, 1327, 1533, 1538, 1585, 1590, or 1591.
[0706] 284. The AAV capsid variant of any one of embodiments 267, 268, 270, or 378-281, which comprises an amino acid sequence comprising one, two, or three but no more than four different amino acids, relative to the amino acid sequence of any of SEQ ID NOs: 946, 952, 953, or 954.
[0707] 285. The AAV capsid variant of any one of embodiments 267-277 or 282, which comprises an amino acid sequence comprising one, two, or three but no more than four modifications, e.g., substitutions (e.g., conservative substitutions), insertions, or deletions, relative to the amino acid sequence of YPAEVVQK (SEQ ID NO: 943).
[0708] 286. The AAV capsid variant of any one of embodiments 267, 268, 270, 278-281, or 283, which comprises an amino acid sequence comprising one, two, or three but no more than four modifications, e.g., substitutions (e.g., conservative substitutions), insertions, or deletions, relative to the amino acid sequence of any one of SEQ ID NOs: 1021, 1024, 1232, 1300, 1327, 1533, 1538, 1585, 1590, or 1591.
[0709] 287. The AAV capsid variant of any one of embodiments 267, 268, 270, 278-281, or 284, which comprises an amino acid sequence comprising one, two, or three but no more than four modifications, e.g., substitutions (e.g., conservative substitutions), insertions, or deletions, relative to the amino acid sequence of any one of SEQ ID NOs: 946, 952, 953, or 954.
[0710] 288. The AAV capsid variant of any one of embodiments 267-277, 282, or 285, which comprises an amino acid sequence encoded by:
   [0711] (i) a nucleotide sequence comprising at least one, two, three, four, five, six, or seven modifications, e.g., substitutions, but no more than ten modifications, e.g., substitutions, relative to the nucleotide sequence of SEQ ID NO: 944; or
   [0712] (ii) a nucleotide sequence comprising at least one, two, three, four, five, six, or seven, but no more than ten different nucleotides relative to the nucleotide sequence of SEQ ID NO: 944.
[0713] 289. The AAV capsid variant of any one of embodiments 267-277, 282, 285, or 289, wherein the nucleotide sequence encoding the amino acid sequence comprises:
   [0714] (i) a nucleotide sequence comprising at least one, two, three, four, five, six, or seven modifications, e.g., substitutions, but no more than ten modifications, e.g., substitutions, relative to the nucleotide sequence of SEQ ID NO: 944; or
   [0715] (ii) a nucleotide sequence comprising at least one, two, three, four, five, six, or seven, but no more than ten different nucleotides relative to the nucleotide sequence of SEQ ID NO: 944.
[0716] 290. The AAV capsid variant of embodiment 267, which comprises:
   [0717] (a) the amino acid sequence of any of SEQ ID NOs: 2024-2063;
   [0718] (b) an amino acid sequence comprising at least 3, 4, 5, 6, 7, 8, 9, 10, 11, 12, 13, 14, or 15 consecutive amino acids from any one of SEQ ID NOs: 2024-2063;
   [0719] (c) an amino acid sequence comprising one, two, or three but no more than four different amino acids, relative to the amino acid sequence of any one of SEQ ID NOs: 2024-2063; or
   [0720] (d) an amino sequence comprising one, two, or three but no more than four modifications, e.g., substitutions (e.g., conservative substitutions), insertions, or deletions, relative to the amino acid sequence of any one of SEQ ID NOs: 2024-2063.
[0721] 291. The AAV capsid variant of embodiment 267 or 290, wherein the different amino acids of the amino acid sequence comprising one, two, or three but no more than four different amino acids, relative to the amino acid sequence of any one of SEQ ID NOs: 2024-2063, are present at one or more of the following positions:
   [0722] (i) position 1, wherein the different amino acid is T or L;
   [0723] (ii) position 2, wherein the different amino acid is N, L, K, A, T, or P;
   [0724] (iii) position 3, wherein the different amino acid is N, K, L, A, Y, or S;
   [0725] (iv) position 4, wherein the different amino acid is Q, L, T, S, F, Y, K, or A;
   [0726] (v) position 5, wherein the different amino acid is S, H, A, M, Q, T, V, or F;
   [0727] (vi) position 6, wherein the different amino acid is S, P, V, A, Q, L, T, N, or M; (vii) position 7, wherein the different amino acid is Y, H, S, V, A, L, or T;
   [0728] (viii) position 8, wherein the different amino acid is D, P, A, Q, F, L, S, H, or M;
   [0729] (ix) position 9, wherein the different amino acid is F, A, L, D, or Q;
   [0730] (x) position 10, wherein the different amino acid is T, E, I, or S;
   [0731] (xi) position 11, wherein the different amino acid is V, A, N, or S;
   [0732] (xii) position 12, wherein the different amino acid is V, L, or P;
   [0733] (xiii) position 13, wherein the different amino acid is Q, E, or P;
   [0734] (xiv) position 14, wherein the different amino acid is K, N, S, or L;
   [0735] (xv) position 15, wherein the different amino acid is T, V, M, or L; and/or
   [0736] (xvi) position 16, wherein the different amino acid is A, G, or R.
[0737] 292. The AAV capsid variant of embodiment 267, which comprises:
   [0738] (a) the amino acid sequence of any one of SEQ ID NOs: 1632-2023;
   [0739] (b) an amino acid sequence comprising at least 3, 4, 5, 6, 7, 8, 9, 10, 11, 12, 13, 14, or 15 consecutive amino acids from any one of SEQ ID NOs: 1632-2023;
   [0740] (c) an amino acid sequence comprising one, two, or three but no more than four different amino acids, relative to the amino acid sequence of any one of SEQ ID NOs: 1632-2023; or
   [0741] (d) an amino sequence comprising one, two, or three but no more than four modifications, e.g., substitutions (e.g., conservative substitutions), insertions, or deletions, relative to the amino acid sequence of any one of SEQ ID NOs: 1632-2023.
[0742] 293. The AAV capsid variant of embodiment 268 or 292, wherein the different amino acids of the amino acid sequence comprising one, two, or three but no more than four different amino acids, relative to the amino acid sequence of any one of SEQ ID NOs: 1632-2023, are present at one or more of the following positions:
   [0743] (i) position 1, wherein the different amino acid is T, G, N, S, E, L, Y, V, or I;
   [0744] (ii) position 2, wherein the different amino acid is D, N, K, E, V, G, R, L, H, F, P, T, A, S, I, or Y;
   [0745] (iii) position 3, wherein the different amino acid is Y, N, K, T, W, Q, M, V, C, A, L, F, H, G, R, S, or P;
   [0746] (iv) position 4, wherein the different amino acid is H, Q, P, E, R, K, A, S, V, L, T, D, I, G, M, or N;
   [0747] (v) position 5, wherein the different amino acid is R, S, K, N, H, G, W, A, P, V, Q, Y, L, or F;
   [0748] (vi) position 6, wherein the different amino acid is G, S, F, R, W, H, I, C, M, A, Y, K, N, Q, V, P, E, D, T, or L;
   [0749] (vii) position 7, wherein the different amino acid is D, Y, S, I, H, F, P, K, R, G, L, Q, A, M, T, N, V, W, C, or E;
   [0750] (viii) position 8, wherein the different amino acid is P, L, Q, T, W, V, G, K, I, Y, N, H, R, D,
[0751] S, M, A, F, or E;
   [0752] (ix) position 9, wherein the different amino acid is A, R, T, Q, S, M, L, E, K, V, G, D, N, H, F, P, or I;
   [0753] (x) position 10, wherein the different amino acid is K, E, Q, H, V, G, R, S, P, I, N, M, A, L,
[0754] D, or T;
   [0755] (xi) position 11, wherein the different amino acid is V, A, E, N, R, L, M, T, Q, S, K, C, G, D, Y, P, H, F, or I;
   [0756] (xii) position 12, wherein the different amino acid is V, P, L, S, T, N, A, G, K, R, I, H, E, Q, or M;
   [0757] (xiii) position 13, wherein the different amino acid is Q, K, N, A, H, R, T, V, E, I, P, G, S, or
[0758] L;
   [0759] (xiv) position 14, wherein the different amino acid is K, E, I, Y, Q, R, G, D, L, N, or S;
   [0760] (xv) position 15, wherein the different amino acid is S, T, N, Q, I, P, E, G, K, M, or H; and/or
   [0761] (xvi) position 16, wherein the different amino acid is A, D, L, Y, Q, or T.
[0762] 294. The AAV capsid variant of any one of embodiments 267-293, wherein the amino acid sequence is present in loop VIII.
[0763] 295. The AAV capsid variant of any one of embodiments 267-294, wherein the amino acid sequence is present immediately subsequent to position 570, 571, 572, 573, 574, 575, or 576, relative to a reference sequence numbered according to the amino acid sequence of SEQ ID NO: 138 or 982.
[0764] 296. The AAV capsid variant of any one of embodiments 267-295, wherein the amino acid sequence replaces one, two, three, four, five or all of positions 571, 572, 573, 574, 575, and/or 576 (e.g., positions T571, N572, N573, Q574, S575, S576, T577, T578, and/or A579), relative to a reference sequence numbered according to the amino acid sequence of SEQ ID NO: 138.
[0765] 297. The AAV capsid variant of any one of embodiments 267-296, wherein the amino acid sequence is present immediately subsequent to position 576, relative to a reference sequence numbered according to the amino acid sequence of SEQ ID NO: 138 or 982.
[0766] 298. The AAV capsid variant of any one of embodiments 267-297, which comprises an amino acid residue other than T at position 577, relative to a reference sequence numbered according to the amino acid sequence of SEQ ID NO: 138.
[0767] 299. The AAV capsid variant of any one of embodiments 267-298, which comprises the amino acid Y at position 577, relative to a reference sequence numbered according to the amino acid sequence of SEQ ID NO: 138 or 982.
[0768] 300. The AAV capsid variant of any one of embodiments 267-299, which comprises the substitution T577Y, numbered according to SEQ ID NO: 138.
[0769] 301. The AAV capsid variant of embodiment 298 or 299, wherein the amino acid sequence is or comprises YPAEVVQK (SEQ ID NO: 943), and starts at position 577, relative to a reference sequence numbered according to the amino acid sequence of SEQ ID NO: 138 or 982.
[0770] 302. The AAV capsid variant of any one of embodiments 267-277, 282, 285, 288, 289, or 294-301, which comprises an amino acid other than T at position 577, and further comprises the amino acid sequence of PAEVVQK (SEQ ID NO: 20), which is present immediately subsequent to position 577, numbered relative to SEQ ID NO: 138.
[0771] 303. The AAV capsid variant of any one of embodiments 267-277, 282, 285, 288, 289, or 294-302, which comprises the amino acid Y at position 577, and further comprises the amino acid sequence of PAEVVQK (SEQ ID NO: 20), which is present immediately subsequent to position 577, numbered relative to SEQ ID NO: 138.
[0772] 304. The AAV capsid variant of any one of embodiments 267-277, 282, 285, 288, 289, or 294-303, which comprises the amino acid Y at position 577, and further comprises the amino acid sequence of PAEVVQK (SEQ ID NO: 20), which is present immediately subsequent to position 577 (e.g., at positions 578-584), numbered relative to SEQ ID NO: 982.
[0773] 305. The AAV capsid variant of any one of embodiments 267-277, 282, 285, 288, 289, or 294-304, which comprises the amino acid sequence of YPAEVVQK (SEQ ID NO: 943), wherein the amino acid sequence replaces position 577 (e.g., T577), relative to a reference sequence numbered according to the amino acid sequence of SEQ ID NO: 138.
[0774] 306. The AAV capsid variant of any one of embodiments 267-277, 282, 285, 288, 289, or 294-305, which comprises the amino acid sequence of YPAEVVQK (SEQ ID NO: 943), wherein the amino acid sequence:
   [0775] (i) is present immediately subsequent to position 576; and
   [0776] (ii) replaces position 577 (e.g., T577), wherein in (i) and (ii) are numbered relative to SEQ ID NO: 138.
[0777] 307. The AAV capsid variant of any one of embodiments 267-277, 282, 285, 288, 289, or 294-306, which further comprises an amino acid other than T at position 571 (e.g., I), numbered relative to SEQ ID NO: 138 or SEQ ID NO: 982.
[0778] 308. The AAV capsid variant of any one of embodiments 267-277, 272, 275, 278, 289, or 294-307, which further comprises I at position 571, numbered relative to SEQ ID NO: 138 or SEQ ID NO: 982.
[0779] 309. The AAV capsid variant of any one of embodiments 267-277, 282, 285, 288, 289, or 294-308, which further comprises one, two, or all of an amino acid other than Q at position 574 (e.g., A or T), S at position 575 (e.g., G), and/or S (e.g., A, L, K, or R) at position 576, numbered relative to SEQ ID NO: 138 or SEQ ID NO: 982.
[0780] 310. The AAV capsid variant of any one of embodiments 267-277, 282, 285, 288, 289, or 294-309, which further comprises:
   [0781] (i) A at position 574, G at position 575, and A at position 576, numbered relative to SEQ ID NO: 138 or 982; or
   [0782] (ii) T at position 574 and L at position 576, numbered relative to SEQ ID NO: 138 or 982.
[0783] 311. The AAV capsid variant of any one of embodiments 267-277, 282, 285, 288, 289, or 294-309, which further comprises:
   [0784] (i) K at position 576, numbered relative to SEQ ID NO: 138 or 982; or
   [0785] (ii) R at position 576, numbered relative to SEQ ID NO: 138 or 982.
[0786] 312. The AAV capsid variant of any one of embodiments 267-277, 282, 285, 288, 289, or 294-310, which comprises:
   [0787] (i) A at position 574, G at position 575, A at position 576, and Y at position 577, numbered relative to SEQ ID NO: 138 or 982; and
   [0788] (ii) the amino acid sequence of PAEVVQK (SEQ ID NO: 20), which is present immediately subsequent to position 577, numbered according to SEQ ID NO: 138 or 982.
[0789] 313. The AAV capsid variant of any one of embodiments 267-277, 282, 285, 288, 289, or 294-310, which comprises:
   [0790] (i) T at position 574, L at position 576, and Y at position 577, numbered relative to SEQ ID NO: 138 or 982; and
   [0791] (ii) the amino acid sequence of PAEVVQK (SEQ ID NO: 20), which is present immediately subsequent to position 577, numbered according to SEQ ID NO: 138 or 982.
[0792] 314. The AAV capsid variant of any one of embodiments 267-277, 282, 285, 288, 289, 294-309, or 311, which comprises:
   [0793] (i) K at position 576 and Y at position 577, numbered relative to SEQ ID NO: 138 or 982; and
   [0794] (ii) the amino acid sequence of PAEVVQK (SEQ ID NO: 20), which is present immediately subsequent to position 577, numbered according to SEQ ID NO: 138 or 982.
[0795] 315. The AAV capsid variant of any one of embodiments 267-277, 282, 285, 288, 289, 295-309, or 311, which comprises:
   [0796] (i) R at position 576 and Y at position 577, numbered relative to SEQ ID NO: 138 or 982; and
   [0797] (ii) the amino acid sequence of PAEVVQK (SEQ ID NO: 20), which is present immediately subsequent to position 577, numbered according to SEQ ID NO: 138 or 982.
[0798] 316. The AAV capsid variant of any one of embodiments 267-277, 282, 285, 288, 289, 294-308, which comprises:
   [0799] (i) I at position 571 and Y at position 577, numbered relative to SEQ ID NO: 138 or 982; and
   [0800] (ii) the amino acid sequence of PAEVVQK (SEQ ID NO: 20), which is present immediately subsequent to position 577, numbered according to SEQ ID NO: 138 or 982.
[0801] 317. The AAV capsid variant of any one of embodiments 267, 268, 270, 278, 283, 284, 286, or 287, which comprises Y at position 577 and the amino acid sequence TPSLVQK (SEQ ID NO: 53), which is present immediately subsequent to position 577, all numbered according to SEQ ID NO: 138 or 982.
[0802] 318. The AAV capsid variant of any one of embodiments 267, 268, 270, 279, 283, 284, 286, or 287, which comprises Y at position 577 and the amino acid sequence PPSLVQK (SEQ ID NO: 47), which is present immediately subsequent to position 577, all numbered according to SEQ ID NO: 138 or 982.
[0803] 319. The AAV capsid variant of any one of embodiments 267, 268, 270, 280, 283, 284, 286, or 287, which comprises Y at position 577 and the amino acid sequence PPSLEQK (SEQ ID NO: 54), which is present immediately subsequent to position 577, all numbered according to SEQ ID NO: 138 or 982.
[0804] 320. The AAV capsid variant of any one of embodiments 267, 268, 270, 281, 283, 284, 286, or 287, which comprises Y at position 577 and the amino acid sequence PPSLVKK (SEQ ID NO: 55), which is present immediately subsequent to position 577, all numbered according to SEQ ID NO: 138 or 982.
[0805] 321. The AAV capsid variant, of any one of the preceding embodiments, which further comprises a modification, e.g., an insertion, substitution (e.g., conservative substitution), and/or deletion, in loop I, II, IV, and/or VI.
[0806] 322. The AAV capsid variant of any one of the preceding embodiments, which comprises an amino acid sequence comprising at least one, two or three modifications, e.g., substitutions (e.g., conservative substitutions), insertions, or deletions, but not more than 30, 20 or 10 modifications, e.g., substitutions (e.g., conservative substitutions), insertions, or deletions, relative to the amino acid sequence of SEQ ID NO: 138.
[0807] 323. The AAV capsid variant, of any one of the preceding embodiments, which comprises an amino acid sequence comprising at least one, two or three, but no more than 30, 20 or 10 different amino acids relative to the amino acid sequence of SEQ ID NO: 138.
[0808] 324. The AAV capsid variant, of any one of the preceding embodiments, which comprises the amino acid sequence of SEQ ID NO: 138, or an amino acid sequence with at least 80% (e.g., at least about 85, 90, 95, 96, 97, 98, or 99%) sequence identity thereto.
[0809] 325. The AAV capsid variant, of any one of the preceding embodiments, which comprises the amino acid sequence of SEQ ID NO: 138.
[0810] 326. The AAV capsid variant, of any one of the preceding embodiments, which comprises an amino acid sequence encoded by the nucleotide sequence of SEQ ID NO: 137, or a sequence with at least 80% (e.g., at least about 85, 90, 95, 96, 97, 98, or 99%) sequence identity thereto.
[0811] 327. The AAV capsid variant, of any one of the preceding embodiments, wherein the nucleotide sequence encoding the capsid variant comprises the nucleotide sequence of SEQ ID NO: 137, or a sequence with at least 80% (e.g., at least about 85, 90, 95, 96, 97, 98, or 99%) sequence identity thereto.
[0812] 328. The AAV capsid variant, of any one of the preceding embodiments, which comprises a VP1 protein, a VP2 protein, a VP3 protein, or a combination thereof.
[0813] 329. The AAV capsid variant, of any one of embodiments 1-98, 125-242, 267-277, 282, 285, 288, 289, 294-306, or 321-328, which comprises the amino acid sequence corresponding to positions 137-731, e.g., a VP2, of SEQ ID NO: 982, or a sequence with at least 80% (e.g., at least about 85, 90, 95, 96, 97, 98, or 99%) sequence identity thereto.
[0814] 330. The AAV capsid variant, of any one of embodiments 1-98, 125-242, 267-277, 282, 285, 288, 289, 294-306, or 321-329, which comprises the amino acid sequence corresponding to positions 193-731, e.g., a VP3, of SEQ ID NO: 982, or a sequence with at least 80% (e.g., at least about 85, 90, 95, 96, 97, 98, or 99%) sequence identity thereto.
[0815] 331. The AAV capsid variant, of any one of embodiments 1-321, which comprises the amino acid sequence corresponding to positions 137-724, e.g., a VP2, of SEQ ID NO: 138, or a sequence with at least 80% (e.g., at least about 85, 90, 95, 96, 97, 98, or 99%) sequence identity thereto.
[0816] 332. The AAV capsid variant, of any one of embodiments 1-321, which comprises the amino acid sequence corresponding to positions 193-724, e.g., a VP3, of SEQ ID NO: 138, or a sequence with at least 80% (e.g., at least about 85, 90, 95, 96, 97, 98, or 99%) sequence identity thereto.
[0817] 333. The AAV capsid variant, of any one of embodiments 267-277, 282, 285, 288, 289, 294-306, or 321-328, comprising an amino acid sequence comprising at least 3, 4, 5, or 6 consecutive amino acids from the amino acid sequence of YPAEVVQK (SEQ ID NO: 943), wherein:
   [0818] (i) the 3 consecutive amino acids comprise YPA;
   [0819] (ii) the 4 consecutive amino acids comprise YPAE (SEQ ID NO: 21);
   [0820] (iii) the 5 consecutive amino acids comprise YPAEV (SEQ ID NO: 1);
   [0821] (iv) the 6 consecutive amino acids comprise YPAEVV (SEQ ID NO: 725);
   [0822] (v) the 7 consecutive amino acids comprise YPAEVVQ (SEQ ID NO: 726);
[0823] wherein the AAV capsid variant comprises the amino acid sequence of SEQ ID NO: 739, or an amino acid sequence at least 90%, 95%, 96%, 97%, 98%, or 99% identical to SEQ ID NO: 739.
[0824] 334. The AAV capsid variant, of any one of embodiments 267-277, 282, 285, 288, 289, 294-306, 321-328, or 333, comprising an amino acid sequence comprising at least 3, 4, 5, or 6 consecutive amino acids from the amino acid sequence of YPAEVVQK (SEQ ID NO: 943), wherein:
   [0825] (i) the 3 consecutive amino acids comprise YPA;
   [0826] (ii) the 4 consecutive amino acids comprise YPAE (SEQ ID NO: 21);
   [0827] (iii) the 5 consecutive amino acids comprise YPAEV (SEQ ID NO: 1);
   [0828] (iv) the 6 consecutive amino acids comprise YPAEVV (SEQ ID NO: 725);
   [0829] (v) the 7 consecutive amino acids comprise YPAEVVQ (SEQ ID NO: 726);
[0830] wherein the AAV capsid variant comprises: (a) a VP1 protein comprising the amino acid sequence of SEQ ID NO: 138 or SEQ ID NO: 982; (b) a VP2 protein comprising the amino acid sequence of positions 137-724 of SEQ ID NO: 138 or positions 137-731 of SEQ ID NO: 982; (c) a VP3 protein comprising the amino acid sequence of positions 193-724 of SEQ ID NO: 138 or positions 193-731 of SEQ ID NO: 982; or (d) an amino acid sequence with at least 90% (e.g., at least about 95, 96, 97, 98, or 99%) sequence identity to any of the amino acid sequences in (a)-(c).
[0831] 335. The AAV capsid variant, of any one of embodiments 267-277, 282, 285, 288, 289, 294-306, 321-328, or 334, comprising one, two, or three but no more than four different amino acids, relative to the amino acid sequence of YPAEVVQK (SEQ ID NO: 943), wherein the AAV capsid variant comprises: (a) a VP1 protein comprising the amino acid sequence of SEQ ID NO: 138 or SEQ ID NO: 982;
   [0832] (b) a VP2 protein comprising the amino acid sequence of positions 137-724 of SEQ ID NO: 138 or positions 137-731 of SEQ ID NO: 982;
   [0833] (c) a VP3 protein comprising the amino acid sequence of positions 193-724 of SEQ ID NO: 138 or positions 193-731 of SEQ ID NO: 982; or
   [0834] (d) an amino acid sequence with at least 90% (e.g., at least about 95, 96, 97, 98, or 99%) sequence identity to any of the amino acid sequences in (a)-(c).
[0835] 336. The AAV capsid variant, of any one of embodiments 267-277, 282, 285, 288, 289, 294-306, 321-328, or 333-335, comprising one, two, or three but no more than four different amino acids, relative to the amino acid sequence of YPAEVVQK (SEQ ID NO: 943), wherein the AAV capsid variant comprises the amino acid sequence of SEQ ID NO: 739; or an amino acid sequence at least 90%, 95%, 96%, 97%, 98%, or 99% sequence identity to the amino acid sequence of SEQ ID NO: 739.
[0836] 337. The AAV capsid variant, of any one of embodiments 267-277, 282, 285, 288, 289, 294-306, 321-328, or 333-336, comprising one or two, but no more than three substitutions relative to the amino acid sequence of YPAEVVQK (SEQ ID NO: 943), wherein the AAV capsid variant comprises an amino acid sequence at least 90% (e.g., at least about 95, 96, 97, 98, or 99%) identical to the amino acid sequence of SEQ ID NO: 982.
[0837] 338. The AAV capsid variant, of any one of embodiments 1-98, 125-241, 267-277, 282, 285, 288, 289, 294-306, 321-328, or 333-337, which comprises the amino acid sequence of SEQ ID NO: 982, or an amino acid sequence with at least 80% (e.g., at least about 85, 90, 95, 96, 97, 98, or 99%) sequence identity thereto.
[0838] 339. The AAV capsid variant, of any one of embodiments 1-98, 125-241, 267-277, 282, 285, 288, 289, 294-306, 321-328, or 333-338, which comprises the amino acid sequence of SEQ ID NO: 982 or an amino acid sequence with at least 95% identity thereto.
[0839] 340. The AAV capsid variant, of any one of embodiments 1-98, 125-241, 267-277, 282, 285, 288, 289, 294-306, 321-328, or 333-339, which comprises the amino acid sequence of SEQ ID NO: 982 or an amino acid sequence with at least 98% identity thereto.
[0840] 341. The AAV capsid variant of any one of embodiments 1-98, 125-241, 267-277, 282, 285, 288, 289, 294-306, 321-328, or 333-340, which comprises an amino acid sequence comprising at least one, two or three modifications, e.g., substitutions (e.g., conservative substitutions), insertions, or deletions, but not more than 30, 20 or 10 modifications, e.g., substitutions (e.g., conservative substitutions), insertions, or deletions, relative to the amino acid sequence of SEQ ID NO: 982.
[0841] 342. The AAV capsid variant, of any one of embodiments 1-98, 125-241, 267-277, 282, 285, 288, 289, 294-306, 321-328, or 333-341, which comprises an amino acid sequence comprising at least one, two or three, but not more than 30, 20 or 10 different amino acids, relative to the amino acid sequence of SEQ ID NO: 982.
[0842] 343. The AAV capsid variant, of any one of the preceding embodiments 1-98, 125-241, 267-277, 282, 285, 288, 289, 294-306, 321-328, or 333-342, wherein the nucleotide sequence encoding the capsid variant comprises the nucleotide sequence of SEQ ID NO: 984, or a nucleotide sequence with at least 80% (e.g., at least about 85, 90, 95, 96, 97, 98, or 99%) sequence identity thereto.
[0843] 344. The AAV capsid variant, of any one of the preceding embodiments, wherein the nucleotide sequence encoding the capsid variant is codon optimized.
[0844] 345. An AAV capsid variant (e.g., an AAV5 capsid variant) comprising the amino acid sequence of any one of embodiments 267-277, 282, 285, 288, 289, 294-306, 321-328, or 333-342, and further comprising an amino acid sequence at least 80% (e.g., at least about 85, 90, 95, 96, 97, 98, or 99%) identical to SEQ ID NO: 982.
[0845] 346. An AAV capsid variant (e.g., an AAV5 capsid variant) comprising an amino acid sequence at least 90%, 95%, 96%, 97%, 98%, or 99% sequence identity to the amino acid sequence of SEQ ID NO: 739, wherein the AAV capsid variant comprises the amino acid sequence of YPAEVVQK (SEQ ID NO: 943).
[0846] 347. The AAV capsid variant of embodiment 346, wherein the AAV capsid variant comprises the amino acid sequence of SEQ ID NO: 739.
[0847] 348. An AAV capsid variant (e.g., an AAV5 capsid variant) comprising the amino acid sequence of SEQ ID NO: 982.
[0848] 349. An AAV capsid variant (e.g., an AAV5 capsid variant) comprising an amino acid sequence encoded by the nucleotide sequence of SEQ ID NO: 984, or a nucleotide sequence at least 95% identical thereto.
[0849] 350. The AAV capsid variant of any one embodiments 1-66, 139, 140, 146-241, 267, 268, 270-289, or 294-349, which has an increased tropism for a CNS cell or tissue, e.g., a brain cell, brain tissue, spinal cord cell, or spinal cord tissue, relative to the tropism of a reference sequence comprising the amino acid sequence of SEQ ID NO: 138.
[0850] 351. The AAV capsid variant of any one embodiments 1-66, 139, 140, 146-241, 267, 268, 270-289, or 294-350, which has an increased tropism for a CNS cell or tissue, e.g., a brain cell, brain tissue, spinal cord cell, or spinal cord tissue, relative to the tropism of a reference sequence comprising the amino acid sequence of SEQ ID NO: 982.
[0851] 352. The AAV capsid variant of any one embodiments 1-66, 139, 140, 146-241, 267, 268, 270-289, or 294-351, which has an increased tropism for a CNS cell or tissue, e.g., a brain cell, brain tissue, spinal cord cell, or spinal cord tissue, relative to the tropism of a reference sequence comprising the amino acid sequence of SEQ ID NO: 139.
[0852] 353. The AAV capsid variant of any one of embodiments 1-66, 139, 140, 146-241, 267, 268, 270-289, or 294-352, which transduces a brain region, e.g., a temporal cortex, perirhinal cortex, globus pallidus, putamen, caudate, thalamus, hippocampus, geniculate nucleus, Purkinje Layer, deep cerebellar nuclei, and/or cerebellum, optionally wherein the level of transduction is at least 1.5, 2.2, 2.4, 2.5, 2.6, 2.7, 3.0, 3.2, 3.5, 3.7, 4.0, 4.2, 4.5, 4.7, 4.9, 5, 10, 15, 20, 25, 30, 35-fold greater as compared to a reference sequence of SEQ ID NO: 139, e.g., when measured by an assay, e.g., an immunohistochemistry assay or a qPCR assay, e.g., as described in Example 2.
[0853] 354. The AAV capsid variant of any one of embodiments 1-66, 139, 140, 146-241, 267, 268, 270-289, or 294-353, which is enriched at least about 2, 3, 4, 5, 6, 7, 8, 9, 10, 12, 15, 17, 20, 25, 30, 35, 40, 45, 50, 55, 60, or 65-fold, in the brain compared to a reference sequence of SEQ ID NO: 138, e.g., when measured by an assay as described in Example 1.
[0854] 355. The AAV capsid variant of any one of embodiments 1-66, 139, 140, 146-241, 267, 268, 270-289, or 294-354, which is enriched at least about 10, 12, 15, 17, 20, 25, 30, 35, 40, 45, 50, 55, 60, 61, 62, 63, 64, or 65-fold, in the brain compared to a reference sequence of SEQ ID NO: 138, e.g., when measured by an assay as described in Example 1.
[0855] 356. The AAV capsid variant of any one of embodiments 1-66, 139, 140, 146-241, 267, 268, 270-289, or 294-355, which is enriched in the brain of at least two to three species, e.g., a non-human primate and rodent (e.g., rat and/or mouse), e.g., as compared to a reference sequence of SEQ ID NO: 138.
[0856] 357. The AAV capsid variant, of any one of embodiments 1-66, 139, 140, 146-241, 267, 268, 270-289, or 294-356, which is enriched at least about 2, 3, 4, 5, 6, 7, 8, 9, 10, 12, 15, 17, 20, 25, 30, 35, 40, 45-fold, in the brain of at least two to three species, e.g., a non-human primate and rodent (e.g., rat and/or mouse), compared to a reference sequence of SEQ ID NO: 138, e.g., when measured by an assay as described in Examples 1, 2, 4, and 5.
[0857] 358. The AAV capsid variant of embodiment 356 or 357, wherein the at least two to three species are Macaca fascicularis, Chlorocebus sabaeus, Callithrix jacchus, rat, and/or mouse (e.g., BALB/c mice).
[0858] 359. The AAV capsid variant, of any one of embodiments 1-66, 139, 140, 146-241, 267, 268, 270-289, or 294-358, which is enriched at least about 5, 10, 15, 20, 25, 30, 35, 40, 45, 50, 55, 60, 65, 70, 75, 80, 85, 90, 100, 125, 150, 175, 200, or 225-fold, in the brain compared to a reference sequence of SEQ ID NO: 982, e.g., when measured by an assay as described in Example 4.
[0859] 360. The AAV capsid variant of any one of embodiments 1-66, 139, 140, 146-241, 267, 268, 270-289, or 294-359, which delivers an increased level of a payload to a brain region, optionally wherein the level of the payload is increased by at least 20, 25, 30, 35-fold, as compared to a reference sequence of SEQ ID NO: 139, e.g., when measured by an assay, e.g., a qRT-PCR or a qPCR assay (e.g., as described in Example 2).
[0860] 361. The AAV capsid variant of any one of embodiments 1-66, 139, 140, 146-241, 267, 268, 270-289, or 294-360, which delivers an increased level of viral genomes to a brain region, optionally wherein the level of viral genomes is increased by at least 1.5, 2.2, 2.4, 2.5, 2.6, 2.7, 3.0, 3.2, 3.5, 3.7, 4.0, 4.2, 4.5, 4.7, 4.9, or 5-fold, as compared to a reference sequence of SEQ ID NO: 139, e.g., when measured by an assay, e.g., a qRT-PCR or a qPCR assay (e.g., as described in Example 2).
[0861] 362. The AAV capsid variant of any one of embodiments 350-361, wherein the brain region is a temporal cortex, perirhinal cortex, globus pallidus, putamen, caudate, thalamus, hippocampus, geniculate nucleus, Purkinje Layer, deep cerebellar nuclei, cerebellum, or a combination thereof.
[0862] 363. The AAV capsid variant of any one of embodiments 1-66, 139, 140, 146-241, 267, 268, 270-289, or 294-362, which is enriched at least about 3, 3.5, 4.0, 4.5, 5, 5.0, 6.0, or 6.5-fold, in a spinal cord region compared to a reference sequence of SEQ ID NO: 139, e.g., when measured by an assay as described in Example 2.
[0863] 364. The AAV capsid variant of any one of embodiments 363, wherein the spinal cord region is a cervical region, a lumbar region, a thoracic region, or a combination thereof.
[0864] 365. The AAV capsid variant of any one of the preceding embodiments, which shows preferential transduction in a brain region relative to the transduction in the dorsal root ganglia (DRG).
[0865] 366. The AAV capsid variant of any one of embodiments 1-66, 139, 140, 146-241, 267, 268, 270-289, or 294-365, which is capable of transducing neuronal cells.
[0866] 367. The AAV capsid variant of any one of embodiments 1-66, 139, 140, 146-241, 267, 268, 270-289, or 294-366, which is capable of transducing non-neuronal cells, e.g., glial cells (e.g., oligodendrocytes).
[0867] 368. The AAV capsid variant of any one of embodiments 1-66, 139, 140, 146-241, 267, 268, 270-289, or 294-367, which shows preferential transduction in a brain region relative to the transduction in the liver.
[0868] 369. The AAV capsid variant of any one embodiments 67-267, 269, 271-277, 282, 285, 288, 289, 294-306, or 321-349, which has an increased tropism for a heart cell or heart tissue, e.g., a heart ventricle or heart atrium, relative to the tropism of a reference sequence comprising the amino acid sequence of SEQ ID NO: 138.
[0869] 370. The AAV capsid variant of any one embodiments 67-267, 269, 271-277, 282, 285, 288, 289, 294-306, 321-349, or 369, which has an increased tropism for a heart cell or tissue, e.g., a heart ventricle or heart atrium, relative to the tropism of a reference sequence comprising the amino acid sequence of SEQ ID NO: 139.
[0870] 371. The AAV capsid variant of any one of embodiments 67-267, 269, 271-277, 282, 285, 288, 289, 294-306, 321-349, 369, or 370, which delivers an increased level of a payload to a heart region, optionally wherein the level of the payload is increased by at least 1.5, 2, or 2.5-fold, as compared to a reference sequence of SEQ ID NO: 139, e.g., when measured by an assay, e.g., an IHC assay or a RT-ddPCR assay (e.g., as described in Example 2).
[0871] 372. The AAV capsid variant of any one embodiments 67-267, 269, 271-277, 282, 285, 288, 289, 294-306, 321-349, or 369-371, which has an increased tropism for a heart cell or tissue, e.g., a heart ventricle or heart atrium, relative to the tropism of a reference sequence comprising the amino acid sequence of SEQ ID NO: 982.
[0872] 373. The AAV capsid variant, of any one of embodiments 67-267, 269, 271-277, 282, 285, 288, 289, 294-306, 321-349, or 369-372, which is enriched at least about 4, 5, 10, 15, 20, 25, 30, 35, 40, 45, or 50-fold, in the heart compared to a reference sequence of SEQ ID NO: 982, e.g., when measured by an assay as described in Example 4.
[0873] 374. The AAV capsid variant of any one embodiments 267, 290, 291, 321-328, 331, 332, or 344, which has an increased tropism for a muscle cell or tissue, relative to the tropism of a reference sequence comprising the amino acid sequence of SEQ ID NO: 982.
[0874] 375. The AAV capsid variant, of any one of embodiments 267, 290, 291, 321-328, 331, 332, 344, or 374, which is enriched at least about 2, 3, 4, 5, 10, 15, 20, 25, 30, or 35-fold, in the muscle compared to a reference sequence of SEQ ID NO: 982, e.g., when measured by an assay as described in Example 4.
[0875] 376. The AAV capsid variant embodiment 374 or 375, wherein the muscle cell or tissue is a heart muscle (e.g., a heart ventricle or a heart atrium, or both), a quadriceps muscle, or both.
[0876] 377. The AAV capsid variant of any one embodiments 267, 292, 293, 321-328, 331, 332, or 344, which has an increased tropism for a liver cell or tissue, relative to the tropism of a reference sequence comprising the amino acid sequence of SEQ ID NO: 982.
[0877] 378. The AAV capsid variant, of any one of embodiments 267, 292, 293, 321-328, 331, 332, 344, or 377, which is enriched at least about 10, 15, 20, 25, 30, 35, 40, 45, 50, 55, 60, 65, 70, 75, 80, 85, 90, 95, 100, 110, 115, 120, 130, 140, 150, 160, 170, 180, 185, or 190-fold, in the liver compared to a reference sequence of SEQ ID NO: 982, e.g., when measured by an assay as described in Example 4.
[0878] 379. A polynucleotide encoding the AAV capsid variant of any one of embodiments 1-378.
[0879] 380. The polynucleotide of embodiment 379, which comprises:
   [0880] (i) a nucleotide sequence comprising at least one, two, three, four, five, six, or seven modifications, e.g., substitutions, but no more than ten modifications, e.g., substitutions, relative to the nucleotide sequences of SEQ ID NO: 944;
   [0881] (ii) a nucleotide sequence comprising at least one, two, three, four, five, six, or seven, but no more than ten different nucleotides, relative to the nucleotide sequences of SEQ ID NO: 944; or
   [0882] (iii) the nucleotide sequence of SEQ ID NO: 944, or nucleotide sequence substantially identical (e.g., having at least 70%, 75%, 80%, 85%, 90%, 92%, 95%, 97%, 98%, or 99% sequence identity) thereto.
[0883] 381. The polynucleotide of embodiment 379 or 380, which comprises the nucleotide sequence of SEQ ID NO: 984, or a nucleotide sequence with at least 80% (e.g., at least about 85, 90, 95, 96, 97, 98, or 99%) sequence identity thereto.
[0884] 382. A polynucleotide encoding an AAV capsid variant (e.g., an AAV5 capsid variant), wherein the polynucleotide comprises the nucleotide sequence of SEQ ID NO: 984.
[0885] 383. A polynucleotide encoding an AAV capsid variant (e.g., an AAV5 capsid variant), wherein the encoded AAV capsid variant comprise the amino acid sequence of SEQ ID NO: 982.
[0886] 384. A polynucleotide encoding an AAV capsid variant (e.g., an AAV5 capsid variant), wherein the encoded AAV capsid variant comprises:
   [0887] (a) the amino acid sequence of any one of the sequences provided in Tables 1, 2A, 2B, 9, or 15-20;
   [0888] (b) an amino acid sequence comprising at least 3, 4, 5, 6, 7, 8, 9, 10, 11, 12, 13, 14, or 15 consecutive amino acids from any one of the sequences provided in Tables 1, 2A, 2B, 9, or 15-20; or
   [0889] (c) an amino acid sequence comprising one, two, or three but no more than four different amino acids, relative to the amino acid sequence of any one of the amino acid sequences provided in Tables 1, 2A, 2B, 9, or 15-20; or
   [0890] (d) an amino sequence comprising one, two, or three but no more than four modifications, e.g., substitutions (e.g., conservative substitutions), insertions, or deletions, relative to the amino acid sequence of any one of the amino acid sequences provided in Tables 1, 2A, 2B, 9, or 15-20.
[0891] 385. A polynucleotide encoding an AAV capsid variant (e.g., an AAV5 capsid variant), wherein the encoded AAV capsid variant comprises:
   [0892] (i) the amino acid sequence of YPAEVVQK (SEQ ID NO: 943);
   [0893] (ii) an amino acid sequence comprising one, two, or three, but no more than four different amino acids relative to the amino acid sequence of YPAEVVQK (SEQ ID NO: 943);
   [0894] (iii) an amino acid sequence comprising one, two, or three modifications, e.g., substitutions (e.g., conservative substitutions), but no more than four modifications, e.g., substitutions (e.g., conservative substitutions), relative to the amino acid sequence of YPAEVVQK (SEQ ID NO: 943); or
   [0895] (iv) at least 3, 4, 5, 6, or 7 consecutive amino acids from the amino acid sequence of YPAEVVQK (SEQ ID NO: 943).
[0896] 386. The polynucleotide of any one of embodiments 384 or 385, which comprises:
   [0897] (i) the nucleotide sequence of SEQ ID NO: 944, or a nucleotide sequence substantially identical (e.g., having at least 70%, 75%, 80%, 85%, 90%, 92%, 95%, 97%, 98%, or 99% sequence identity) thereto;
   [0898] (ii) a nucleotide sequence comprising at least one, two, three, four, five, six, or seven, but no more than ten different nucleotides, relative to the nucleotide sequence of SEQ ID NO: 944; or
   [0899] (iii) a nucleotide sequence comprising at least one, two, three, four, five, six, or seven modifications, e.g., substitutions, insertions, or deletions, but no more than ten modifications, e.g., substitutions, insertions, or deletions, relative to the nucleotide sequence of SEQ ID NO: 944.
[0900] 387. The polynucleotide of any one of embodiments 384-386, wherein the AAV capsid variant comprises:
   [0901] (i) the amino acid sequence of SEQ ID NO: 982, or an amino acid sequence with at least 80% (e.g., at least about 85, 90, 95, 96, 97, 98, or 99%) sequence identity thereto;
   [0902] (ii) an amino acid sequence comprising one, two or three, but no more than four different amino acids, relative to the amino acid sequence of SEQ ID NO: 982; or
   [0903] (iii) an amino acid sequence comprising one, two or three modifications, e.g., substitutions (e.g., conservative substitutions), insertions, or deletions, but not more than 30, 20 or 10 modifications, e.g., substitutions (e.g., conservative substitutions), insertions, or deletions, relative to the amino acid sequence of SEQ ID NO: 982.
[0904] 388. The polynucleotide of any one of embodiments 384-387, comprising the nucleotide sequence of SEQ ID NO: 984, or a nucleotide sequence with at least 80% (e.g., at least about 85, 90, 95, 96, 97, 98, or 99%) sequence identity thereto.
[0905] 389. The polynucleotide of any one of embodiments 384-388, which comprises a nucleotide sequence that is codon optimized.
[0906] 390. A peptide comprising:
   [0907] (a) the amino acid sequence of any one of the sequences provided in Tables 1, 2A, 2B, 9, or 15-20;
   [0908] (b) an amino acid sequence comprising at least 3, 4, 5, 6, 7, 8, 9, 10, 11, 12, 13, 14, or 15 consecutive amino acids from any one of the sequences provided in Tables 1, 2A, 2B, 9, or 15-20; or
   [0909] (c) an amino acid sequence comprising one, two, or three but no more than four different amino acids, relative to the amino acid sequence of any one of the amino acid sequences provided in Tables 1, 2A, 2B, 9, or 15-20; or
   [0910] (d) an amino sequence comprising one, two, or three but no more than four modifications, e.g., substitutions (e.g., conservative substitutions), insertions, or deletions, relative to the amino acid sequence of any one of the amino acid sequences provided in Tables 1, 2A, 2B, 9, or 15-20.
[0911] 391. A peptide comprising:
   [0912] (i) the amino acid sequence of YPAEVVQK (SEQ ID NO: 943);
   [0913] (ii) an amino acid sequence comprising one, two, or three, but no more than four different amino acids relative to the amino acid sequence of YPAEVVQK (SEQ ID NO: 943);
   [0914] (iii) an amino acid sequence comprising one, two, or three modifications, e.g., substitutions (e.g., conservative substitutions), but no more than four modifications, e.g., substitutions (e.g., conservative substitutions), relative to the amino acid sequence of YPAEVVQK (SEQ ID NO: 943); or
   [0915] (iv) at least 3, 4, 5, 6, or 7 consecutive amino acids from the amino acid sequence of YPAEVVQK (SEQ ID NO: 943).
[0916] 392. A peptide comprising the amino acid sequence of YPAEVVQK (SEQ ID NO: 943).
[0917] 393. A peptide encoded by:
   [0918] (i) the nucleotide sequence of SEQ ID NO: 944, or a nucleotide sequence substantially identical (e.g., having at least 70%, 75%, 80%, 85%, 90%, 92%, 95%, 97%, 98%, or 99% sequence identity) thereto; or
   [0919] (ii) a nucleotide sequence comprising at least one, two, three, four, five, six, or seven, but no more than ten different nucleotides, relative to the nucleotide sequence of SEQ ID NO: 944;
   [0920] (iii) a nucleotide sequence comprising at least one, two, three, four, five, six, or seven modifications, e.g., substitutions, insertions, or deletions, but no more than ten modifications, e.g., substitutions, insertions, or deletions, relative to the nucleotide sequence of SEQ ID NO: 944.
[0921] 394. A peptide wherein the nucleotide sequence encoding the peptide comprises:
   [0922] (i) the nucleotide sequence of SEQ ID NO: 944, or a nucleotide sequence substantially identical (e.g., having at least 70%, 75%, 80%, 85%, 90%, 92%, 95%, 97%, 98%, or 99% sequence identity) thereto;
   [0923] (ii) a nucleotide sequence comprising at least one, two, three, four, five, six, or seven, but no more than ten different nucleotides relative to the nucleotide sequence of SEQ ID NO: 944; or
   [0924] (iii) a nucleotide sequence comprising at least one, two, three, four, five, six, or seven modifications, e.g., substitutions, insertions, or deletions, but no more than ten modifications, e.g., substitutions, insertions, or deletions, relative to the nucleotide sequence of SEQ ID NO: 944.
[0925] 395. An AAV capsid variant (e.g., an AAV5 capsid variant) comprising the peptide of any one of embodiments 390-394.
[0926] 396. An AAV capsid variant (e.g., an AAV5 capsid variant) encoded by the polynucleotide of any one of embodiments 382-389.
[0927] 397. An AAV particle comprising the AAV capsid variant of any one of embodiments 1-378, 395, or 396.
[0928] 398. The AAV particle of embodiment 399, which comprises a nucleotide sequence encoding a payload.
[0929] 399. The AAV particle of embodiment 398, wherein the encoded pay load comprises a therapeutic protein or functional variant thereof; an antibody or antibody fragment; an enzyme; a component of a gene editing system; an RNAi agent (e.g., a dsRNA, siRNA, shRNA, pre-miRNA, pri-miRNA, miRNA, stRNA, lncRNA, piRNA, or snoRNA); or a combination thereof.
[0930] 400. The AAV particle of embodiment 399, wherein the therapeutic protein or functional variant thereof, e.g., a recombinant protein, is associated with (e.g., aberrantly expressed in) a neurological or neurodegenerative disorder, a muscular or neuromuscular disorder, or a neuro-oncological disorder.
[0931] 401. The AAV particle of embodiment 399 or 400, the therapeutic protein or functional variant thereof is chosen from apolipoprotein E (APOE) (e.g., ApoE2, ApoE3 and/or ApoE4); human survival of motor neuron (SMN) 1 or SMN2; glucocerebrosidase (GBA1); aromatic L-amino acid decarboxylase (AADC); aspartoacylase (ASPA); tripeptidyl peptidase I (CLN2); beta-galactosidase (GLB1); N-sulphoglucosamine sulphohydrolase (SGSH); N-acetyl-alpha-glucosaminidase (NAGLU); iduronate 2-sulfatase (IDS); intracellular cholesterol transporter (NPC1); gigaxonin (GAN); or a combination thereof.
[0932] 402. The AAV particle of embodiment 399, wherein the antibody or antibody binding fragment binds to:
   [0933] (i) a CNS related target, e.g., an antigen associated with a neurological or neurodegenerative disorder, e.g., β-amyloid, APOE, tau, SOD1, TDP-43, huntingtin (HTT), and/or synuclein;
   [0934] (ii) a muscular or neuromuscular related target, e.g., an antigen associated with a muscular or neuromuscular disorder; or
   [0935] (iii) a neuro-oncology related target, e.g., an antigen associated with a neuro-oncological disorder, e.g., HER2, or EGFR (e.g., EGFRvIII).
[0936] 403. The AAV particle of embodiment 399, wherein the enzyme comprises a meganuclease, a zinc finger nuclease, a TALEN, a recombinase, integrase, a base editor, a Cas9, or a fragment thereof.
[0937] 404. The AAV particle of embodiment 399, wherein the component of a gene editing system comprises one or more components of a CRISPR-Cas system.
[0938] 405. The AAV particle of embodiment 404, wherein the one or more components of the CRISPR-Cas system comprises a Cas9, e.g., a Cas9 ortholog or a Cpf1, and a single guide RNA (sgRNA), optionally wherein:
   [0939] (i) the sgRNA is located upstream (5′) of the Cas9 enzyme; or
   [0940] (ii) the sgRNA is located downstream (3′) of the Cas9 enzyme.
[0941] 406. The AAV particle of embodiment 399, wherein the RNAi agent (e.g., a dsRNA, siRNA, shRNA, pre-miRNA, pri-miRNA, miRNA, stRNA, lncRNA, piRNA, or snoRNA), modulates, e.g., inhibits, expression of, a CNS related gene, mRNA, and/or protein.
[0942] 407. The AAV particle of embodiment 406, wherein the CNS related gene is chosen from SOD1, MAPT, APOE, HTT, C9ORF72, TDP-43, APP, BACE, SNCA, ATXNI, ATXN3, ATXN7, SCNIA-SCN5A, SCN8A-SCN11A, or a combination thereof.
[0943] 408. The AAV particle of any one of embodiments 397-407, which comprises a viral genome comprising a promoter operably linked to the nucleic acid sequence encoding the payload.
[0944] 409. The AAV particle of embodiment 408, wherein the promoter is chosen from human elongation factor 1α-subunit (EF1α), cytomegalovirus (CMV) immediate-early enhancer and/or promoter, chicken β-actin (CBA) and its derivative CAG, β glucuronidase (GUSB), or ubiquitin C (UBC), neuron-specific enolase (NSE), platelet-derived growth factor (PDGF), platelet-derived growth factor B-chain (PDGF-β), intercellular adhesion molecule 2 (ICAM-2), synapsin (Syn), methyl-CpG binding protein 2 (MeCP2), Ca2+/calmodulin-dependent protein kinase II (CaMKII), metabotropic glutamate receptor 2 (mGluR2), neurofilament light chain (NFL) or neurofilament heavy chain (NFH), β-globin minigene nβ2, preproenkephalin (PPE), enkephalin (Enk) and excitatory amino acid transporter 2 (EAAT2), glial fibrillary acidic protein (GFAP), myelin basic protein (MBP), a cardiovascular promoter (e.g., aMHC, cTnT, and CMV-MLC2k), a liver promoter (e.g., hAAT, TBG), a skeletal muscle promoter (e.g., desmin, MCK, C512) or a functional fragment, e.g., a truncation, or a functional variant thereof.
[0945] 410. The AAV particle of embodiment 408 or 409, wherein the promoter is an EF-1a promoter variant, e.g., a truncated EF-1a promoter.
[0946] 411. The AAV particle of any one of embodiments 408-410, wherein the promoter comprises the nucleotide sequence of any one of SEQ ID NOs: 2100, 2101, 2103, 2104, 2108, 2109, 2111-2120, or any one of the nucleotide sequences provided in Table 8, a nucleotide sequence comprising at least one, two, three, four, five, six, or seven but no more than ten modifications, e.g., substitutions, insertions, or deletions, relative to the nucleotide sequence of SEQ ID NOs: 2100, 2101, 2103, 2104, 2108, 2109, 2111-2120, or any one of the nucleotide sequences provided in Table 8, or a nucleotide sequence with at least 80% (e.g., 85%, 90%, 95%, 96%, 97%, 98%, or 99%) sequence identity to any one of SEQ ID NOs: 2100, 2101, 2103, 2104, 2108, 2109, 2111-2120, or any one of the nucleotide sequences provided in Table 8.
[0947] 412. The AAV particle of any one of embodiments 408-411 wherein the viral genome further comprises a poly A signal sequence.
[0948] 413. The AAV particle of any one of embodiments 408-412, wherein the viral genome further comprises an inverted terminal repeat (ITR) sequence.
[0949] 414. The AAV particle of any one of embodiments 408-413, wherein the viral genome comprises an ITR sequence positioned 5′ relative to the nucleic acid sequence encoding the payload.
[0950] 415. The AAV particle of any one of embodiments 408-414, wherein the viral genome comprises an ITR sequence positioned 3′ relative to the nucleic acid sequence encoding the payload.
[0951] 416. The AAV particle of any one of embodiments 408-415, wherein the viral genome comprises an ITR sequence positioned 5′ relative to the payload and an ITR sequence positioned 3′ relative to the nucleic acid sequence encoding the payload.
[0952] 417. The AAV particle of any one of embodiments 408-416, wherein the viral genome further comprises an enhancer, a Kozak sequence, an intron region, and/or an exon region.
[0953] 418. The AAV particle of any one of embodiments 408-417, wherein the viral genome further comprises a nucleotide sequence encoding a miR binding site, e.g., a miR binding site that modulates, e.g., reduces, expression of payload encoded by the viral genome in a cell or tissue where the corresponding miRNA is expressed.
[0954] 419. The AAV particle of embodiment 418, wherein the encoded miRNA binding site is complementary, e.g., fully complementary or partially complementary, to a miRNA expressed in a cell or tissue of the DRG, liver, heart, hematopoietic, or a combination thereof.
[0955] 420. The AAV particle of embodiment 418 or 419, wherein the encoded miR binding site modulates, e.g., reduces, expression of the encoded antibody molecule in a cell or tissue of the DRG, liver, heart, hematopoietic lineage, or a combination thereof.
[0956] 421. The AAV particle of any one of embodiments 408-420, wherein the viral genome comprises at least 1-5 copies of the encoded miR binding site, e.g., at least 1, 2, 3, 4, or 5 copies.
[0957] 422. The AAV particle of any one of embodiments 408-421, wherein the viral genome comprises at least 3 copies of an encoded miR binding sites, optionally wherein all three copies comprise the same miR binding site, or at least one, two, three, or all of the copies comprise a different miR binding site.
[0958] 423. The AAV particle of embodiment 422, wherein the 3 copies of the encoded miR binding sites are continuous (e.g., not separated by a spacer).
[0959] 424. The AAV particle of embodiment 422, wherein the 3 copies of the encoded miR binding sites are separated by a spacer, optionally wherein the spacer comprises the nucleotide sequence of GATAGTTA, or a nucleotide sequence comprising one, two, or three modifications, e.g., substitutions, insertions, or deletions, but no more than four modifications, e.g., substitutions, insertions, or deletions, relative to GATAGTTA.
[0960] 425. The AAV particle of any one of embodiments 408-424, wherein the viral genome comprises at least 4 copies of an encoded miR binding site, optionally wherein all four copies comprise the same miR binding site, or at least one, two, three, or all of the copies comprise a different miR binding site.
[0961] 426. The AAV particle of embodiment 425, wherein the 4 copies of the encoded miR binding sites are continuous (e.g., not separated by a spacer).
[0962] 427. The AAV particle of embodiment 425, wherein the 4 copies of the encoded miR binding sites are separated by a spacer, optionally wherein the spacer comprises the nucleotide sequence of GATAGTTA, or a nucleotide sequence comprising at one, two, or three modifications, e.g., substitutions, insertions, or deletions, but no more than four modifications, e.g., substitutions, insertions, or deletions, relative to GATAGTTA.
[0963] 428. The AAV particle of any one of embodiments 408-427, wherein the encoded miR binding site comprises a miR122 binding site, a miR183 binding site, a miR-1 binding site, a miR-142-3p, or a combination thereof, optionally wherein:
   [0964] (i) the encoded miR122 binding site comprises the nucleotide sequence of SEQ ID NO: 4673, or a nucleotide sequence substantially identical (e.g., having at least 70%, 75%, 80%, 85%, 90%, 92%, 95%, 97%, 98%, or 99% sequence identity) thereto; or a nucleotide sequence comprising at least one, two, three, four, five, six, or seven modifications, e.g., substitutions, insertions, or deletions, but no more than ten modifications, e.g., substitutions, insertions, or deletions, relative to SEQ ID NO: 4673;
   [0965] (ii) the encoded miR183 binding site comprises the nucleotide sequence of SEQ ID NO: 4676, or a nucleotide sequence substantially identical (e.g., having at least 70%, 75%, 80%, 85%, 90%, 92%, 95%, 97%, 98%, or 99% sequence identity) thereto; or a nucleotide sequence comprising at least one, two, three, four, five, six, or seven modifications, e.g., substitutions, insertions, or deletions, but no more than ten modifications, e.g., substitutions, insertions, or deletions, relative to SEQ ID NO: 4676;
   [0966] (iii) the encoded miR-1 binding site comprises the nucleotide sequence of SEQ ID NO: 4679, or a nucleotide sequence substantially identical (e.g., having at least 70%, 75%, 80%, 85%, 90%, 92%, 95%, 97%, 98%, or 99% sequence identity) thereto; or a nucleotide sequence comprising at least one, two, three, four, five, six, or seven modifications, e.g., substitutions, insertions, or deletions, but no more than ten modifications, e.g., substitutions, insertions, or deletions, relative to SEQ ID NO: 4679; and/or
   [0967] (iv) the encoded miR-142-3p binding site comprises the nucleotide sequence of SEQ ID NO: 4675, or a nucleotide sequence substantially identical (e.g., having at least 70%, 75%, 80%, 85%, 90%, 92%, 95%, 97%, 98%, or 99% sequence identity) thereto; or a nucleotide sequence comprising at least one, two, three, four, five, six, or seven modifications, e.g., substitutions, insertions, or deletions, but no more than ten modifications, e.g., substitutions, insertions, or deletions, relative to SEQ ID NO: 4675.
[0968] 429. The AAV particle of any one of embodiments 408-428, wherein the viral genome comprises an encoded miR122 binding site.
[0969] 430. The AAV particle of any one of embodiments 408-429, wherein the viral genome comprises at least 1-5 copies, e.g., 1, 2, or 3 copies of a miR122 binding site, optionally wherein each copy is continuous (e.g., not separated by a spacer), or each copy is separated by a spacer, optionally wherein the spacer comprises the nucleotide sequence of GATAGTTA, or a nucleotide sequence comprising one, two, or three modifications, e.g., substitutions, insertions, or deletions, but no more than four modifications, e.g., substitutions, insertions, or deletions, relative to GATAGTTA.
[0970] 431. The AAV particle of embodiment 429 or 430, wherein the encoded miR122 binding site comprises the nucleotide sequence of SEQ ID NO: 4673, or a nucleotide sequence substantially identical (e.g., having at least 70%, 75%, 80%, 85%, 90%, 92%, 95%, 97%, 98%, or 99% sequence identity) thereto; or a nucleotide sequence comprising at least one, two, three, four, five, six, or seven modifications, e.g., substitutions, insertions, or deletions, but no more than ten modifications, e.g., substitutions, insertions, or deletions, relative to SEQ ID NO: 4673.
[0971] 432. The AAV particle of any one of embodiments 408-431, wherein the viral genome comprises: (A) (i) a first encoded miR122 binding site comprising the nucleotide sequence of SEQ ID NO: 4673, or a nucleotide sequence substantially identical (e.g., having at least 70%, 75%, 80%, 85%, 90%, 92%, 95%, 97%, 98%, or 99% sequence identity) thereto; or a nucleotide sequence comprising at least one, two, three, four, five, six, or seven modifications, e.g., substitutions, insertions, or deletions, but no more than ten modifications, e.g., substitutions, insertions, or deletions, relative to SEQ ID NO: 4673;
   [0972] (ii) a first spacer comprising the nucleotide sequence of GATAGTTA, or a nucleotide sequence comprising one, two, or three modifications, e.g., substitutions (e.g., conservative substitutions), but no more than four modifications, e.g., substitutions (e.g., conservative substitutions), relative to GATAGTTA; and
   [0973] (iii) a second encoded miR122 binding site comprising the nucleotide sequence of SEQ ID NO: 4673, or a nucleotide sequence substantially identical (e.g., having at least 70%, 75%, 80%, 85%, 90%, 92%, 95%, 97%, 98%, or 99% sequence identity) thereto; or a nucleotide sequence comprising at least one, two, three, four, five, six, or seven modifications, e.g., substitutions, insertions, or deletions, but no more than ten modifications, e.g., substitutions, insertions, or deletions, relative to SEQ ID NO: 4673; or
[0974] (B) (i) a first encoded miR122 binding site comprising the nucleotide sequence of SEQ ID NO: 4673, or a nucleotide sequence substantially identical (e.g., having at least 70%, 75%, 80%, 85%, 90%, 92%, 95%, 97%, 98%, or 99% sequence identity) thereto; or a nucleotide sequence comprising at least one, two, three, four, five, six, or seven modifications, e.g., substitutions, insertions, or deletions, but no more than ten modifications, e.g., substitutions, insertions, or deletions, relative to SEQ ID NO: 4673;
   [0975] (ii) a first spacer comprising the nucleotide sequence of GATAGTTA, or a nucleotide sequence comprising one, two, or three modifications, e.g., substitutions (e.g., conservative substitutions), but no more than four modifications, e.g., substitutions (e.g., conservative substitutions), relative to GATAGTTA;
   [0976] (iii) a second encoded miR122 binding site comprising the nucleotide sequence of SEQ ID NO: 4673, or a nucleotide sequence substantially identical (e.g., having at least 70%, 75%, 80%, 85%, 90%, 92%, 95%, 97%, 98%, or 99% sequence identity) thereto; or a nucleotide sequence comprising at least one, two, three, four, five, six, or seven modifications, e.g., substitutions, insertions, or deletions, but no more than ten modifications, e.g., substitutions, insertions, or deletions, relative to SEQ ID NO: 4673;
   [0977] (iv) a second spacer comprising the nucleotide sequence of GATAGTTA, or a nucleotide sequence comprising one, two, or three modifications, e.g., substitutions (e.g., conservative substitutions), but no more than four modifications, e.g., substitutions (e.g., conservative substitutions), relative to GATAGTTA; and
   [0978] (v) a third encoded miR122 binding site comprising the nucleotide sequence of SEQ ID NO: 4673, or a nucleotide sequence substantially identical (e.g., having at least 70%, 75%, 80%, 85%, 90%, 92%, 95%, 97%, 98%, or 99% sequence identity) thereto; or a nucleotide sequence comprising at least one, two, three, four, five, six, or seven modifications, e.g., substitutions, insertions, or deletions, but no more than ten modifications, e.g., substitutions, insertions, or deletions, relative to SEQ ID NO: 4673.
[0979] 433. The AAV particle of any one of embodiments 408-432, wherein the viral genome comprises an encoded miR183 binding site.
[0980] 434. The AAV particle of any one of embodiments 408-433, wherein the viral genome comprises at least 1-5 copies, e.g., 1, 2, or 3 copies of a miR183 binding site, optionally wherein each copy is continuous (e.g., not separated by a spacer), or each copy is separated by a spacer, optionally wherein the spacer comprises the nucleotide sequence of GATAGTTA, or a nucleotide sequence comprising one, two, or three modifications, e.g., substitutions, insertions, or deletions, but no more than four modifications, e.g., substitutions, insertions, or deletions, relative to GATAGTTA.
[0981] 435. The AAV particle of embodiment 433 or 434, wherein the encoded miR183 binding site comprises the nucleotide sequence of SEQ ID NO: 4673, or a nucleotide sequence substantially identical (e.g., having at least 70%, 75%, 80%, 85%, 90%, 92%, 95%, 97%, 98%, or 99% sequence identity) thereto; or a nucleotide sequence comprising at least one, two, three, four, five, six, or seven modifications, e.g., substitutions, insertions, or deletions, but no more than ten modifications, e.g., substitutions, insertions, or deletions, relative to SEQ ID NO: 4673.
[0982] 436. The AAV particle of any one of embodiments 408-435, wherein the viral genome comprises: (A) (i) a first encoded miR183 binding site comprising the nucleotide sequence of SEQ ID NO: 4676, or a nucleotide sequence substantially identical (e.g., having at least 70%, 75%, 80%, 85%, 90%, 92%, 95%, 97%, 98%, or 99% sequence identity) thereto; or a nucleotide sequence comprising at least one, two, three, four, five, six, or seven modifications, e.g., substitutions, insertions, or deletions, but no more than ten modifications, e.g., substitutions, insertions, or deletions, relative to SEQ ID NO: 4676;
   [0983] (ii) a first spacer comprising the nucleotide sequence of GATAGTTA, or a nucleotide sequence comprising at least one, two, or three modifications, e.g., substitutions, insertions, or deletions, but no more than four modifications, e.g., substitutions, insertions, or deletions, relative to GATAGTTA; and
   [0984] (iii) a second encoded miR183 binding site comprising the nucleotide sequence of SEQ ID NO: 4676, or a nucleotide sequence substantially identical (e.g., having at least 70%, 75%, 80%, 85%, 90%, 92%, 95%, 97%, 98%, or 99% sequence identity) thereto; or a nucleotide sequence comprising at least one, two, three, four, five, six, or seven modifications, e.g., substitutions, insertions, or deletions, but no more than ten modifications, e.g., substitutions, insertions, or deletions, relative to SEQ ID NO: 4676; or
   [0985] (B) (i) a first encoded miR183 binding site comprising the nucleotide sequence of SEQ ID NO: 4676, or a nucleotide sequence substantially identical (e.g., having at least 70%, 75%, 80%, 85%, 90%, 92%, 95%, 97%, 98%, or 99% sequence identity) thereto; or a nucleotide sequence comprising at least one, two, three, four, five, six, or seven modifications, e.g., substitutions, insertions, or deletions, but no more than ten modifications, e.g., substitutions, insertions, or deletions, relative to SEQ ID NO: 4676;
   [0986] (ii) a first spacer comprising the nucleotide sequence of GATAGTTA, or a nucleotide sequence comprising at least one, two, or three modifications, e.g., substitutions, insertions, or deletions, but no more than four modifications, e.g., substitutions, insertions, or deletions, relative to GATAGTTA;
   [0987] (iii) a second encoded miR183 binding site comprising the nucleotide sequence of SEQ ID NO: 4676, or a nucleotide sequence substantially identical (e.g., having at least 70%, 75%, 80%, 85%, 90%, 92%, 95%, 97%, 98%, or 99% sequence identity) thereto; or a nucleotide sequence comprising at least one, two, three, four, five, six, or seven modifications, e.g., substitutions, insertions, or deletions, but no more than ten modifications, e.g., substitutions, insertions, or deletions, relative to SEQ ID NO: 4676;
   [0988] (iv) a second spacer comprising the nucleotide sequence of GATAGTTA, or a nucleotide sequence comprising at least one, two, or three modifications, e.g., substitutions, insertions, or deletions, but no more than four modifications, e.g., substitutions, insertions, or deletions, relative to GATAGTTA; and
   [0989] (v) a third encoded miR183 binding site comprising the nucleotide sequence of SEQ ID NO: 4676, or a nucleotide sequence substantially identical (e.g., having at least 70%, 75%, 80%, 85%, 90%, 92%, 95%, 97%, 98%, or 99% sequence identity) thereto; or a nucleotide sequence comprising at least one, two, three, four, five, six, or seven modifications, e.g., substitutions, insertions, or deletions, but no more than ten modifications, e.g., substitutions, insertions, or deletions, relative to SEQ ID NO: 4676.
[0990] 437. The AAV particle of any one of embodiments 408-436, wherein the viral genome comprises an encoded miR122 binding site and a miR-1 binding site.
[0991] 438. The AAV particle of any one of embodiments 408-437, wherein the viral genome is single stranded or self-complementary.
[0992] 439. The AAV particle of any one of embodiments 408-438, wherein the viral genome further comprises a nucleotide sequence encoding a Rep protein, e.g., a non-structural protein, wherein the Rep protein comprises a Rep78 protein, a Rep68, Rep52 protein, and/or a Rep40 protein (e.g., a Rep78 and a Rep52 protein).
[0993] 440. The AAV particle of any one of embodiments 397-439, wherein the AAV particle further comprises a nucleotide sequence encoding a Rep protein, e.g., a non-structural protein, wherein the Rep protein comprises a Rep78 protein, a Rep68, Rep52 protein, and/or a Rep40 protein (e.g., a Rep78 and a Rep52 protein).
[0994] 441. The AAV particle of embodiment 439 or 440, wherein the Rep78 protein, the Rep68 protein, the Rep52 protein, and/or the Rep40 protein are encoded by at least one Rep gene.
[0995] 442. The AAV particle of any one of embodiments 408-441, wherein the viral genome further comprises a nucleotide sequence encoding the AAV capsid variant of any one of embodiments 1-364, 381, or 382.
[0996] 443. The AAV particle of any one of embodiments 397-442, wherein the AAV particle further comprises a nucleotide sequence encoding the AAV capsid variant of any one of embodiments 1-364, 381, or 382.
[0997] 444. The AAV capsid variant, polynucleotide, peptide, or AAV particle of any one of the preceding embodiments, which is isolated, e.g., recombinant.
[0998] 445. A vector comprising a polynucleotide encoding the AAV capsid variant of any one of embodiments 1-378, 395, 396, or 444, the polynucleotide of any one of embodiments 379-389 or 444, or a polynucleotide encoding the peptide of any one of embodiments 390-394 or 444.
[0999] 446. A cell, e.g., a host cell, comprising the AAV capsid variant of any one of embodiments 1-378, 395, 396, or 444, the polynucleotide of any one of embodiments 379-389 or 444, the peptide of any one of embodiments 390-394 or 444, the AAV particle of any one of embodiments 397-444, or the vector of embodiment 445.
[1000] 447. The cell of embodiment 446, wherein the cell is a mammalian cell or an insect cell.
[1001] 448. The cell of embodiment 446 or 447, wherein the cell is a cell of a brain region or a spinal cord region, optionally a cell of the temporal cortex, perirhinal cortex, globus pallidus, putamen, caudate, thalamus, hippocampus, geniculate nucleus, Purkinje Layer, deep cerebellar nuclei, cerebellum, cervical spinal cord, thoracic spinal cord, lumbar spinal cord, or a combination thereof.
[1002] 449. The cell of any one of embodiments 446-448, wherein the cell is a neuron, a sensory neuron, a motor neuron, an astrocyte, a glial cell, oligodendrocyte, or a muscle cell (e.g., a cell of the heart, diaphragm, or quadriceps).
[1003] 450. A method of making an AAV particle, comprising
   [1004] (i) providing a host cell comprising a viral genome; and
   [1005] (ii) incubating the host cell under conditions suitable to enclose the viral genome in the AAV capsid variant of any one of embodiments 1-378, 395, 396, or 444, or an AAV capsid variant encoded by the polynucleotide of any one of embodiments 379-389 or 444;
   [1006] thereby making the AAV particle.
[1007] 451. The method of embodiment 450, further comprising, prior to step (i), introducing a first nucleic acid molecule comprising the viral genome into the host cell.
[1008] 452. The method of embodiment 450 or 451, wherein the host cell comprises a second nucleic acid encoding the capsid variant.
[1009] 453. The method of embodiment 452, wherein the second nucleic acid molecule is introduced into the host cell prior to, concurrently with, or after the first nucleic acid molecule.
[1010] 454. A pharmaceutical composition comprising the AAV particle of any one of embodiments 397-444, an AAV particle comprising the capsid variant of any one of embodiments 1-378, 395, 396, or 444, or an AAV particle comprising the peptide of any one of embodiments 390-394 or 444, and a pharmaceutically acceptable excipient.
[1011] 455. A method of delivering a payload to a cell or tissue (e.g., a CNS cell, a CNS tissue, a heart cell, a heart tissue, a muscle cell, a muscle tissue, a liver cell, or a liver tissue), comprising administering an effective amount of the pharmaceutical composition of embodiment 454, the AAV particle of any one of embodiments 397-444, an AAV particle comprising the capsid variant of any one of embodiments 1-378, 395, 396, or 444, or an AAV particle comprising the peptide of any one of embodiments 390-394 or 444.
[1012] 456. The method of embodiment 455, wherein the cell is a cell of a brain region or a spinal cord region, optionally a cell of the temporal cortex, perirhinal cortex, globus pallidus, putamen, caudate, thalamus, hippocampus, geniculate nucleus, Purkinje Layer, deep cerebellar nuclei, cerebellum, cervical spinal cord region, thoracic spinal cord region, lumbar spinal cord region, or a combination thereof.
[1013] 457. The method of embodiment 455, wherein the cell is a cell of the heart, e.g., a heart atrium or a heart ventricle.
[1014] 458. The method of embodiment 455, wherein the cell is a cell of the muscle (e.g., a cell of the quadriceps) or liver.
[1015] 459. The method of embodiment 455 or 456, wherein the cell is a neuron, a sensory neuron, a motor neuron, an astrocyte, a glial cell, or an oligodendrocyte.
[1016] 460. The method of any one of embodiments 455-459, wherein the cell or tissue is within a subject.
[1017] 461. The method of embodiment 460, wherein the subject has, has been diagnosed with having, or is at risk of having a genetic disorder, e.g., a monogenic disorder or a polygenic disorder.
[1018] 462. The method of embodiment 460 or 461, wherein the subject has, has been diagnosed with having, or is at risk of having a neurological, e.g., a neurodegenerative disorder.
[1019] 463. The method of embodiment 460 or 461, wherein the subject has, has been diagnosed with having, or is at risk of having a muscular disorder or a neuromuscular disorder.
[1020] 464. The method of embodiment 460 or 461, wherein the subject has, has been diagnosed with having, or is at risk of having a neuro-oncological disorder.
[1021] 465. A method of treating a subject having or diagnosed with having a genetic disorder, e.g., a monogenic disorder or a polygenic disorder, comprising administering to the subject an effective amount of the pharmaceutical composition of embodiment 454, the AAV particle of any one of embodiments 397-444, an AAV particle comprising the capsid variant of any one of embodiments 1-378, 395, 396, or 444, or an AAV particle comprising the peptide of any one of embodiments 390-394 or 444.
[1022] 466. A method of treating a subject having or diagnosed with having a neurological disorder, e.g., a neurodegenerative disorder, comprising administering to the subject an effective amount of the pharmaceutical composition of embodiment 454, the AAV particle of any one of embodiments 397-444, an AAV particle comprising the capsid variant of any one of embodiments 1-378, 395, 396, or 444, or an AAV particle comprising the peptide of any one of embodiments 390-394 or 444.
[1023] 467. A method of treating a subject having or diagnosed with having a muscular disorder or a neuromuscular disorder, comprising administering to the subject an effective amount of the pharmaceutical composition of embodiment 454, the AAV particle of any one of embodiments 397-444, an AAV particle comprising the capsid variant of any one of embodiments 1-378, 395, 396, or 444, or an AAV particle comprising the peptide of any one of embodiments 390-394 or 444.
[1024] 468. A method of treating a subject having or diagnosed with having a neuro-oncological disorder, comprising administering to the subject an effective amount of the pharmaceutical composition of embodiment 454, the AAV particle of any one of embodiments 397-444, an AAV particle comprising the capsid variant of any one of embodiments 1-378, 395, 396, or 444, or an AAV particle comprising the peptide of any one of embodiments 390-394 or 444.
[1025] 469. The method of any one of embodiments 465-468, wherein the genetic disorder, neurological disorder, neurodegenerative disorder, muscular disorder, neuromuscular disorder, or neuro-oncological disorder is Huntington's Disease, Amyotrophic Lateral Sclerosis (ALS), Gaucher Disease, Dementia with Lewy Bodies, Parkinson's disease, Spinal Muscular Atrophy, Alzheimer's Disease, a leukodystrophy (e.g., Alexander disease, autosomal dominant leukodystrophy with autonomic diseases (ADLD), Canavan disease, cerebrotendinous xanthomatosis (CTX), metachromatic leukodystrophy (MLD), Pelizaeus-Merzbacher disease, or Refsum disease), or a cancer (e.g., a HER2/neu positive cancer or a glioblastoma).
[1026] 470. The method of any one of embodiments 465-469, wherein treating comprises prevention of progression of the disease or disorder in the subject.
[1027] 471. The method of any one of embodiments 460-470, wherein the subject is a human.
[1028] 472. The method of any one of embodiments 465-471, wherein the AAV particle is administered to the subject intravenously, via intra-cisterna magna injection (ICM), intracerebrally, intrathecally, intracerebroventricularly, via intraparenchymal administration, or intramuscularly.
[1029] 473. The method of any one of embodiments 465-472, wherein the AAV particle is administered to the subject via focused ultrasound (FUS), e.g., coupled with the intravenous administration of microbubbles (FUS-MB), or MRI-guided FUS coupled with intravenous administration.
[1030] 474. The method of any one of embodiments 465-472, wherein the AAV particle is administered to the subject intravenously.
[1031] 475. The method of any one of embodiments 465-475, wherein administration of the AAV particle results in a decreased presence, level, and/or activity of a gene, mRNA, protein, or combination thereof.
[1032] 476. The method of any one of embodiments 465-475, wherein administration of the AAV particle results in an increased presence, level, and/or activity of a gene, mRNA, protein, or a combination thereof.
[1033] 477. The pharmaceutical composition of embodiment 454, the AAV particle of any one of embodiments 397-444, an AAV particle comprising the capsid variant of any one of embodiments 1-378, 395, 396, or 444, or an AAV particle comprising the peptide of any one of embodiments 390-394 or 444, for use in a method of delivering a payload to a cell or tissue.
[1034] 478. The pharmaceutical composition of embodiment 454, the AAV particle of any one of embodiments 397-444, an AAV particle comprising the capsid variant of any one of embodiments 1-378, 395, 396, or 444, or an AAV particle comprising the peptide of any one of embodiments 390-394 or 444, for use in a method of treating a genetic disorder, a neurological disorder, a neurodegenerative disorder, a muscular disorder, a neuromuscular disorder, or a neuro-oncological disorder.
[1035] 479. The pharmaceutical composition of embodiment 454, the AAV particle of any one of embodiments 397-444, an AAV particle comprising the capsid variant of any one of embodiments 1-378, 395, 396, or 444, or an AAV particle comprising the peptide of any one of embodiments 390-394 or 444, an AAV particle comprising the peptide of any one of embodiments 376-380 or 430, for use in the manufacture of a medicament.
[1036] 480. Use of the pharmaceutical composition of embodiment 454, the AAV particle of any one of embodiments 397-444, an AAV particle comprising the capsid variant of any one of embodiments 1-378, 395, 396, or 444, or an AAV particle comprising the peptide of any one of embodiments 390-394 or 444, in the manufacture of a medicament.
[1037] 481. Use of the pharmaceutical composition of embodiment 454, the AAV particle of any one of embodiments 397-444, an AAV particle comprising the capsid variant of any one of embodiments 1-378, 395, 396, or 444, or an AAV particle comprising the peptide of any one of embodiments 390-394 or 444, in the manufacture of a medicament for treating a genetic disorder, a neurological disorder, a neurodegenerative disorder, a muscular disorder, a neuromuscular disorder, or a neuro-oncological disorder.

[1038] The details of one or more embodiments of the disclosure are set forth in the accompanying description below. Other features, objects and advantages of the disclosure will be apparent from the description. In the description, the singular forms also include the plural unless the context clearly dictates otherwise. Certain terms are defined in the Definition section and throughout.

### BRIEF DESCRIPTION OF THE DRAWINGS

[1039] FIGS. 1A-1D show immunohistochemistry images from various CNS and peripheral tissues isolated from NHPs (cynomolgus macaques) at 28 days post intravenous administration of AAV particles comprising the TTN-002 capsid variant (top panels) or AAV9 control capsid (bottom panels) and a self-complementary genome encoding a payload fused to an HA tag driven by a heterologous constitutive promoter. FIG. 1A shows, from left to right, the cerebellum (Purkinje layer), spinal cord (cervical), cortex (temporal), and the brainstem. FIG. 1B shows, from left to right, the globus pallidus, the hippocampus, the thalamus, the putamen, and the dentate. FIG. 1C shows, from left to right, the whole brain (level H), the whole brain (level K), and the cerebellum. FIG. 1D shows, from left to right, the spinal cord (thoracic), the DRG (thoracic), the liver, and the heart.

### DETAILED DESCRIPTION OF THE DISCLOSURE

[1040] Described herein, inter alia, are compositions comprising an AAV capsid variant, e.g., an AAV capsid variant described herein, and methods of making and using the same. Generally, the AAV capsid variant has enhanced tropism for a cell or tissue, e.g., for the delivery of a payload to said cell or tissue, for example, a CNS tissue, a CNS cell, a heart cell, a heart tissue, a muscle cell, a muscle tissue, a liver cell, or a liver tissue.

[1041] As demonstrated in the Examples herein below, certain AAV capsid variants described herein show multiple advantages over wild-type AAV5 and/or wild-type AAV9, including (i) increased penetrance through the blood brain barrier following intravenous administration, (ii) wider distribution throughout the multiple brain regions, e.g., frontal cortex, sensory cortex, motor cortex, putamen, thalamus, cerebellar cortex, dentate nucleus, caudate, and/or hippocampus, (iii) elevated payload expression in multiple brain regions, (iv) wider distribution in one or more peripheral tissues, e.g., the heart, muscle, and/or liver, and/or (v) elevated payload expression in one or more peripheral tissues. Without wishing to be being bound by theory, it is believed that these advantages may be due, in part, to the dissemination of the AAV capsid variants through the brain vasculature. In some embodiments, the AAV capsids described herein enhance the delivery of a pay load to multiple regions of the brain including, for example, the frontal cortex, sensory cortex, motor cortex, putamen, thalamus, cerebellar cortex, dentate nucleus, caudate, and/or hippocampus. In some embodiments, the AAV capsids described herein enhance the delivery of a payload to the heart, the muscle, and/or the liver.

[1042] In some embodiments, AAV capsid variants disclosed herein comprise a modification in loop VIII of AAV5, e.g., at positions between 571-579, e.g., at position 577, numbered relative to SEQ ID NO: 138. Without wishing to be bound by theory, it is believed in some embodiments that the aforesaid region (e.g., positions between 571-579, e.g., at position 577) of the AAV5 capsid protrudes above the 3-fold axis of symmetry, e.g., is a surface-exposed location in the AAV5 capsid, e.g., as described in Govindasamy et al. “Structural Insights into Adeno-Associated Virus Serotype 5,” Journal of Virology, 2013, 87 (20): 11187-11199 (the contents of which are hereby incorporated by reference in their entirety). In some embodiments, loop (e.g., loop VIII) is used interchangeably herein with the term variable region (e.g., variable region VIII), or VR (e.g., VR-VIII). In some embodiments loop VIII (e.g., VR-VIII) comprises positions 571-592 (e.g., amino acids TNNQSSTTAPATGTYNLQEIVP (SEQ ID NO: 736)), numbered according to SEQ ID NO: 138. In some embodiments, loop VIII (e.g., VR-VIII) comprises positions 571-599 (e.g., amino acids TNNQSSYPAEVVQKTAPATGTYNLQEIVP (SEQ ID NO: 756)), numbered according to SEQ ID NO: 982. In some embodiments, loop VIII or variable region VIII (VR-VIII) is as described in Govindasamy et al. (supra) (the contents of which are hereby incorporated by reference in their entirety).

[1043] Several approaches have been used to produce AAV capsids with enhanced tropism for a cell or tissue, e.g., a CNS cell or tissue. One approach used co-infection of cultured cells (Grimm et al. In vitro and in vivo gene therapy vector evolution via multispecies interbreeding and retargeting of adeno-associated viruses. J. Virol. 2008 June 82 (12): 5887-5911) or in situ animal tissue (Lisowski et al. Selection and evaluation of clinically relevant AAV variants in a xenograft liver model. Nature 2014 506:382-386) with adenovirus, in order to trigger exponential replication of infectious AAV DNA. Another approach involved the use of cell-specific CRE transgenic mice (Deverman et al. Cre-dependent selection yields AAV variants for widespread gene transfer to the adult brain. Nat Biotechnol. 2016 February 34 (2) 204-209; which is herein incorporated by reference) allowing viral DNA recombination specifically in astrocytes, followed by recovery of CRE-recombined capsid variants. Other approaches apply high throughput DNA synthesis, multiplexing, sequencing technologies, and machine learning to evaluate sequencing reads of viral DNA in different tissues to engineer variant capsids. These approaches are different from the approach disclosed herein.

[1044] There are some limitations to the art-known capsid generation methods. For example, the transgenic CRE system used by Deverman et al. (2016) has limited capabilities in other animal species and AAV variants selected by directed evolution in mouse tissue do not show similar properties in large animals. Previously described transduction-specific approaches are not amenable to large animal studies because: 1) many tissues of interest (e.g., CNS) are not readily accessible to adenovirus co-infection, 2) the specific adenovirus tropism itself would bias the library distribution, and 3) large animals are typically not amenable to transgenesis or genetic engineering to express CRE recombinase in defined cell types.

[1045] To address these limitations, a broadly applicable functional AAV capsid library screening platform for cell type-specific biopanning in non-transgenic animals has been developed and is described in the appended Examples. In the TRACER (Tropism Redirection of AAV by Cell type-specific Expression of RNA) platform system, the capsid gene is placed under the control of a cell type-specific promoter to drive capsid mRNA expression in the absence of helper virus co-infection. Without wishing to be bound by theory, it is believed that this RNA-driven screen increases the selective pressure in favor of capsid variants which transduce a specific cell type. The TRACER platform allows for generation of AAV capsid libraries whereby specific recovery and subcloning of capsid mRNA expressed in transduced cells is achieved with no need for transgenic animals or helper virus co-infection. Without wishing to be bound by theory, it is believed that since mRNA transcription is a hallmark of full transduction, the methods disclosed herein allow identification of fully infectious AAV capsid mutants, and in addition to its higher stringency, this method allows identification of capsids with high tropism for particular cell types using libraries designed to express CAP mRNA under the control of any cell-specific promoter such as, but not limited to, synapsin-1 promoter (neurons), GFAP promoter (astrocytes), TBG promoter (liver), CAMK promoter (skeletal muscle), MYH6 promoter (cardiomyocytes). Described herein are AAV capsid variants generated using the TRACER method which demonstrate enhance tropism in for example a CNS cell, a CNS tissue, a muscle cell, or a muscle tissue.

[1046] The AAV particles and payloads of the disclosure may be delivered to one or more target cells, tissues, organs, or organisms. In some embodiments, the AAV particles of the disclosure demonstrate enhanced tropism for a target cell type, tissue, or organ. As a non-limiting example, the AAV particle may have enhanced tropism for cells and tissues of the central or peripheral nervous systems (CNS and PNS, respectively). In some embodiments, an AAV particle of the disclosure may, in addition, or alternatively, have decreased tropism for a cell-type, tissue, or organ.

[1047] In some embodiments, an AAV particle is used as a biological tool due to a relatively simple structure, their ability to infect a wide range of cells (including quiescent and dividing cells) without integration into the host genome and without replicating, and their relatively benign immunogenic profile. The genome of the virus may be manipulated to contain a minimum of components for the assembly of a functional recombinant virus, or viral particle, which is loaded with or engineered to target a particular tissue and express or deliver a desired payload.

[1048] In some embodiments, the AAV particle is a naturally occurring (e.g., wild-type) AAV or a recombinant AAV. In some embodiments, the wild-type AAV viral genome is a linear, single-stranded DNA (ssDNA) molecule approximately 5,000 nucleotides (nt) in length. In some embodiments, inverted terminal repeats (ITRs) cap the viral genome at both the 5′ and the 3′ end, providing origins of replication for the viral genome. In some embodiments, an AAV viral genome typically comprises two ITR sequences. These ITRs have a characteristic T-shaped hairpin structure defined by a self-complementary region (145nt in wild-type AAV) at the 5′ and 3′ ends of the ssDNA which form an energetically stable double stranded region. The double stranded hairpin structures comprise multiple functions including, but not limited to, acting as an origin for DNA replication by functioning as primers for the endogenous DNA polymerase complex of the host viral replication cell.

[1049] In some embodiments, the wild-type AAV viral genome further comprises nucleotide sequences for two open reading frames, one for the four non-structural Rep proteins (Rep78, Rep68, Rep52, Rep40, encoded by Rep genes) and one for the three capsid, or structural, proteins (VP1, VP2, VP3, encoded by capsid genes or Cap genes). The Rep proteins are used for replication and packaging, while the capsid proteins are assembled to create the protein shell of the AAV, or AAV capsid polypeptide, e.g., an AAV capsid variant. Alternative splicing and alternate initiation codons and promoters result in the generation of four different Rep proteins from a single open reading frame and the generation of three capsid proteins from a single open reading frame. Though it varies by AAV serotype, as a non-limiting example, for AAV5 (SEQ ID NO: 138 and 137) VP1 refers to amino acids 1-724, VP2 refers to amino acids 137-724, and VP3 refers to amino acids 193-724. In some embodiments, for the amino acid sequence of SEQ ID NO: 982, VP1 comprises amino acids 1-731, VP2 comprises amino acids 137-731, and VP3 comprises amino acids 193-731. In other words, VP1 is the full-length capsid sequence, while VP2 and VP3 are shorter components of the whole. As a result, changes in the sequence in the VP3 region, are also changes to VP1 and VP2, however, the percent difference as compared to the parent sequence will be greatest for VP3 since it is the shortest sequence of the three. Though described here in relation to the amino acid sequence, the nucleic acid sequence encoding these proteins can be similarly described. Together, the three capsid proteins assemble to create the AAV capsid protein. While not wishing to be bound by theory, the AAV capsid protein typically comprises a molar ratio of 1:1:10 of VP1:VP2:VP3.

[1050] AAV particles of the present disclosure may be produced recombinantly and may be based on adeno-associated virus (AAV) reference sequences. In addition to single stranded AAV viral genomes (e.g., ssAAVs), the present disclosure also provides for self-complementary AAV (scAAVs) viral genomes. scAAV viral genomes contain DNA strands which anneal together to form double stranded DNA. By skipping second strand synthesis, scAAVs allow for rapid expression in the transduced cell. In some embodiments, the AAV particle of the present disclosure is an scAAV. In some embodiments, the AAV particle of the present disclosure is an ssAAV.

[1051] Methods for producing and/or modifying AAV particles are disclosed in the art such as pseudotyped AAV particles (PCT Patent Publication Nos. WO200028004; WO200123001; WO2004112727; WO2005005610; and WO2005072364, the content of each of which is incorporated herein by reference in its entirety).

[1052] As described herein, the AAV particles of the disclosure comprising an AAV capsid variant, and a viral genome, have enhanced tropism for a cell-type or a tissue, e.g., a CNS cell-type, region, or tissue.

### Peptides

[1053] Disclosed herein are peptides, and associated AAV particles comprising an AAV capsid variant and a peptide for enhanced or improved transduction of a target tissue (e.g., cells of the CNS or PNS). In some, embodiments, the peptide is an isolated, e.g., recombinant, peptide. In some embodiments, the nucleic acid encoding the peptide is an isolated, e.g., recombinant, nucleic acid.

[1054] In some embodiments, the peptide may increase distribution of an AAV particle to a cell, region, or tissue of the CNS. The cell of the CNS may be, but is not limited to, neurons (e.g., excitatory, inhibitory, motor, sensory, autonomic, sympathetic, parasympathetic, Purkinje, Betz, etc.), glial cells (e.g., microglia, astrocytes, oligodendrocytes) and/or supporting cells of the brain such as immune cells (e.g., T cells). The tissue of the CNS may be, but is not limited to, the cortex (e.g., frontal, parietal, occipital, temporal), thalamus, hypothalamus, striatum, putamen, caudate nucleus, hippocampus, entorhinal cortex, basal ganglia, or deep cerebellar nuclei. In some embodiments, the tissue of the CNS is a temporal cortex, perirhinal cortex, globus pallidus, putamen, caudate, thalamus, hippocampus, geniculate nucleus, Purkinje Layer, deep cerebellar nuclei, cerebellum, cervical spinal cord, thoracic spinal cord, or lumbar spinal cord.

[1055] In some embodiments, the peptide may increase distribution of an AAV particle to a cell, region, or tissue of the PNS. The cell or tissue of the PNS may be, but is not limited to, a dorsal root ganglion (DRG).

[1056] In some embodiments, the peptide may increase distribution of an AAV particle to the CNS (e.g., the cortex) after intravenous administration. In some embodiments, the peptide may increase distribution of an AAV particle to the CNS (e.g., the cortex) following focused ultrasound (FUS), e.g., coupled with the intravenous administration of microbubbles (FUS-MB), or MRI-guided FUS coupled with intravenous administration.

[1057] In some embodiments, the peptide may increase distribution of an AAV particle to the PNS (e.g., DRG) after intravenous administration. In some embodiments, the peptide may increase distribution of an AAV particle to the PNS (e.g., DRG) following focused ultrasound (FUS), e.g., coupled with the intravenous administration of microbubbles (FUS-MB), or MRI-guided FUS coupled with intravenous administration.

[1058] In some embodiments, the peptide may increase distribution of an AAV particle to a cell, region, or tissue of a heart, e.g., a heart atrium or a heart ventricle. In some embodiments, the peptide may increase distribution of an AAV particle to a heart cell, region, or tissue after intravenous administration.

[1059] In some embodiments, the peptide may increase distribution of an AAV particle to a cell, region, or tissue of a muscle. In some embodiments, the muscle is a heart muscle (e.g., a heart atrium or a heart ventricle) or a quadriceps. In some embodiments, the peptide may increase distribution of an AAV particle to a muscle cell, region, or tissue after intravenous administration.

[1060] In some embodiments, the peptide may increase distribution of an AAV particle to a cell, region, or tissue of a liver. In some embodiments, the peptide may increase distribution of an AAV particle to a liver cell, region, or tissue after intravenous administration.

[1061] A peptide may vary in length. In some embodiments, the peptide is about 3 to about 20 amino acids in length. As non-limiting examples, the peptide may be 3, 4, 5, 6, 7, 8, 9, 10, 11, 12, 13, 14, 15, 16, 17, 18, 19, 20 or 3-5, 3-8, 3-10, 3-12, 3-15, 3-18, 3-20, 5-10, 5-15, 5-20, 10-12, 10-15, 10-20, 12-20, or 15-20 amino acids in length. In some embodiments, a peptide comprises about 6 to 12 amino acids in length, e.g., about 9 amino acids in length. In some embodiments, a peptide comprises about 7 to 11 amino acids in length, e.g., about 8 amino acids in length. In some embodiments, a peptide comprises about 5 to 10 amino acids in length, e.g., about 7 amino acids in length. In some embodiments, a peptide comprises about 4 to 9 amino acids in length, e.g., about 6 amino acids in length.

[1062] In some embodiments a peptide may comprise a sequence as set forth in Table 1 (e.g., comprising the amino acid sequence of any of SEQ ID NOs: 1021, 1024, 1027, 1112, 1142, 1214, 1232, 1254, 1300, 1310, 1327, 1331, 1342, 1419, 1453, 1533, 1538, 1539, 1575, 1578, 1583-1587, 1590-1593, 1598-1624, or 2064-2079). In some embodiments a peptide may comprise a sequence as set forth in Table 2A or 2B. In some embodiments, the peptide may comprise a sequence set forth in Tables 9 or 15-20. In some embodiments, the peptide is isolated, e.g., recombinant.

TABLE 1
Exemplary Peptide Sequences

| | SEQ | | SEQ | | SEQ |
|---|---|---|---|---|---|
| Peptide | ID | Peptide | ID | Peptide | ID |
| Sequence | NO: | Sequence | NO: | Sequence | NO: |
| TNNQSSYPAEVVQKTA | 1533 | TNNQSSYPPSLEQKTA | 1590 | TNNQSSYPAEVVQKNA | 1619 |
| TNNAGAYPAEVVQKTA | 1021 | TNNQSSYPPSLVKKTA | 1591 | TNNQRKYPAEVVQKTA | 1620 |
| INNQSSYPAEVVQKTA | 1024 | TNNLSSYQAEVVQKTA | 1592 | TNNQSSNPAEEVQKTA | 1621 |
| TNNLGSYPAEVVQKTA | 1027 | TNNQSSYPPSLVQKPA | 1593 | NNNQSSYPAEVVQKTA | 1622 |
| TNNIGSYPAEVVQKTA | 1112 | TNNHSSYPAAVVQKTA | 1598 | TNNQSYYPAEEVQKTA | 1623 |
| TNNSSSYPAEVVQKPA | 1142 | TNSQSSNPAEVVQKTA | 1599 | TKNHSSYPAEVVQKTA | 1624 |
| TNNSSSYTAEVVQKTA | 1214 | NNNQSRYPAEVVQKTA | 1601 | TNSSLSYQAEVVQKTA | 2064 |
| TNNTSLYPAEVVQKTA | 1232 | TNNQSSYTAEVVQKNA | 1602 | TNSSLSYTAEVVQKTA | 2065 |
| TNNQSKYPAEVEQKTA | 1254 | TNNTSLCPAEVVQKTA | 1603 | TNSSLYYPAEVVQKTA | 2066 |
| TNNQSSYPPSLVQKTA | 1300 | TNNQRSYTAEVVQKTA | 1604 | TNTSATYPAEVVQKTA | 2067 |
| TNNHSSYPAEVVQKTA | 1310 | TNSTSLYPAEVVQKTA | 1605 | TNSSLSYPAEVVQKTA | 2068 |
| TNNQSRYPAEVVQKTA | 1327 | TNNQSSYTAEVVKKTA | 1606 | TNSSLSYPAEEVQKTA | 2069 |
| TNNSSSYPAEVVKKTA | 1331 | TNNHSSYPAEVLQKTA | 1607 | TNSSLSYPAEVVQKTD | 2070 |
| TNNQSRYPAEEVQKTA | 1342 | TNNQSSYQAEEVQKTA | 1608 | TNSSLSYPAEVVQNTA | 2071 |
| TNNSSSYPAEVVQQTA | 1419 | TNNKSKYPAEVVQKTA | 1610 | TNSSLSYPAEVVQKNA | 2072 |
| TNNQSKYPAEVVHKTA | 1453 | TNNQSRYPAEVMQKTA | 1611 | TNSSLSYPAEVVQKPA | 2073 |
| TNNQSKYPAEVVQKTA | 1538 | TNSTSPYPAEVVQKTA | 1612 | TNNQTSTEAEVVQKTA | 2074 |
| TNNSSSYPAEVVQKTA | 1539 | TNNQSSYPAWLIQKTA | 1613 | TNKSATYPAEVVQKTA | 2075 |
| TNTASSYPAEVVQKTA | 1575 | TNNQSSYPAEATKKTA | 1614 | TNSSLSYPADVVQKTA | 2076 |
| TNNQSTNKAEVVQKTA | 1578 | TNKQSSYTAEVVQKTA | 1615 | TNNQSSYPAEVVQKTA | 2077 |
| TNNTSLYPAEEVQKTA | 1583 | TNKIGSYPAEVVQKTA | 1616 | TNNQSSYPAEVVQKNA | 2078 |
| TNTASSYQAEVVQKTA | 1584 | TNNKSRYPAEVVQKTA | 1617 | TNNQSSYPSTDVQKTA | 2079 |
| TNNQSSYTPSLVQKTA | 1585 | TNNQSSYPAEVVQKTD | 1618 | TNNKGLYPAEVVQKTA | 2080 |
| TNNQASYPAEVVQKTA | 1586 | TNKQASYPAEVVQKTA | 1587 | TNSTHSYPAEVVQKTA | 751 |

TABLE 2A
Exemplary Peptide Sequences

| | SEQ | Amino | SEQ | |
|---|---|---|---|---|
| | ID | Acid | ID | |
| Peptide | NO: | Sequence | NO: | Nucleotide Sequence |
| 2 | 943 | YPAEVVQK | 944 | TATCCGGCGGAGGTGGTGCAGAAG |

TABLE 2B
Exemplary Peptide Sequences

| Amino Acid | SEQ ID |
|---|---|
| Sequence | NO: |
| YPAEVVQK | 943 |
| YPPSLVQK | 946 |
| NKAEVVQK | 947 |
| YTAEVVQK | 948 |
| YPAEVEQK | 949 |
| YPAEEVQK | 950 |
| YQAEVVQK | 951 |
| YTPSLVQK | 952 |
| YPPSLEQK | 953 |
| YPPSLVKK | 954 |
| YPAEVVKK | 955 |
| YPAEVVHK | 956 |
| YPAAVVQK | 957 |
| NPAEVVQK | 958 |
| YPAEVVQQ | 959 |
| CPAEVVQK | 960 |
| YTAEVVKK | 961 |
| YPAEVLQK | 962 |
| YQAEEVQK | 963 |
| YPAEVVQN | 964 |
| TEAEVVQK | 965 |
| YPADVVQK | 966 |

[1063] In some embodiments, a peptide described herein comprises an amino acid sequence having the formula [N2]-[N3], wherein [N2] comprises positions X1, X2, X3, X4, and X5 and [N3] comprises the amino acid sequence of VQK, VQN, EQK, VKK, VHK, VQQ, or LQK. In some embodiments, position X1 of [N2] is Y, N, C, or T. In some embodiments, position X2 of [N2] is P, E, K, T, or Q. In some embodiments, position X3 of [N2] is A or P. In some embodiments, position X4 of [N2] is E, S, D, or A. In some embodiments, position X5 of [N2] is V, L, or E. In some embodiments, [N2] comprises Y at position X1. In some embodiments, [N2] comprises P at position X2. In some embodiments, [N2] comprises A at position X3. In some embodiments, [N2] comprises E at position X4. In some embodiments, [N2] comprises V at position X5. In some embodiments, the amino acid sequence of [N3] comprises VQK. In some embodiments, the amino acid sequence of [N3] consists of VQK.

[1064] In some embodiments, a peptide described herein comprises an amino acid sequence having the formula [N2]-[N3], wherein [N2] comprises positions X1, X2, X3, X4, and X5 and [N3] comprises the amino acid sequence of VQK, EQK, VKK, VHK, VQQ, or LQK. In some embodiments [N3] comprises the amino acid sequence of VQK, EQK, or VKK. In some embodiments [N3] comprises the amino acid sequence VQK. In some embodiments [N3] consists of the amino acid sequence VQK. In some embodiments, position X1 of [N2] is Y, N, or C. In some embodiments position X1 of [N2] is Y or N. In some embodiments, position X2 of [N2] is P, K, T, or Q. In some embodiments position X2 of [N2] is P, T, or Q. In some embodiments, position X3 of [N2] is A or P. In some embodiments, position X3 of [N2] is A. In some embodiments, position X4 of [N2] is E, S, or A. In some embodiments, position X5 of [N2] is V, L, or E. In some embodiments, position X5 of [N2] is V or L. In some embodiments, [N2] comprises Y at position X1. In some embodiments, [N2] comprises P at position X2. In some embodiments, [N2] comprises A at position X3. In some embodiments, [N2] comprises E at position X4. In some embodiments, [N2] comprises V at position X5. In some embodiments, [N2] comprises YPA, YPP, NKA, YTA, YQA, YTP, NPA, CPA, THA, PAE, PPS, KAE, TAE, QAE, TPS, PAA, HAS, AEV, PSL, AEE, or AAV. In some embodiments, [N2] comprises YPAE (SEQ ID NO: 21), YPPS (SEQ ID NO: 22), NKAE (SEQ ID NO: 23), YTAE (SEQ ID NO: 24), YQAE (SEQ ID NO: 25), YTPS (SEQ ID NO: 26), YPAA (SEQ ID NO: 27), NPAE (SEQ ID NO: 28), CPAE (SEQ ID NO: 29), THAS (SEQ ID NO: 30), PAEV (SEQ ID NO: 17), PPSL (SEQ ID NO: 31), KAEV (SEQ ID NO: 32), TAEV (SEQ ID NO: 16), PAEE (SEQ ID NO: 18), QAEV (SEQ ID NO: 15), TPSL (SEQ ID NO: 33), PAAV (SEQ ID NO: 34), or QAEE (SEQ ID NO: 35). In some embodiments [N2] is or comprises YPAEV (SEQ ID NO: 1), YPPSL (SEQ ID NO: 2), NKAEV (SEQ ID NO: 3), YTAEV (SEQ ID NO: 4), YPAEE (SEQ ID NO: 5), YQAEV (SEQ ID NO: 6), YTPSL (SEQ ID NO: 7), YPAAV (SEQ ID NO: 8), NPAEV (SEQ ID NO: 9), CPAEV (SEQ ID NO: 10), or YQAEE (SEQ ID NO: 11). In some embodiments, [N2] comprises the amino acid sequence of YPAEV (SEQ ID NO: 1). In some embodiments, the amino acid sequence of [N2] consists of YPAEV (SEQ ID NO: 1). In some embodiments, [N2]-[N3] comprises the amino acid sequence of AEVVQK (SEQ ID NO: 36), PSLVQK (SEQ ID NO: 37), AEVEQK (SEQ ID NO: 38), AEEVQK (SEQ ID NO: 39), PSLEQK (SEQ ID NO: 40), PSLVKK (SEQ ID NO: 41), AEVVKK (SEQ ID NO: 42), AEVVHK (SEQ ID NO: 43), AAVVQK (SEQ ID NO: 44), AEVVQQ (SEQ ID NO: 45), or AEVLQK (SEQ ID NO: 46). In some embodiments [N2]-[N3] comprises the amino acid sequence PAEVVQK (SEQ ID NO: 20), PPSLVQK (SEQ ID NO: 47), KAEVVQK (SEQ ID NO: 48), TAEVVQK (SEQ ID NO: 49), PAEVEQK (SEQ ID NO: 50), PAEEVQK (SEQ ID NO: 51), QAEVVQK (SEQ ID NO: 52), TPSLVQK (SEQ ID NO: 53), PPSLEQK (SEQ ID NO: 54), PPSLVKK (SEQ ID NO: 55), PAEVVKK (SEQ ID NO: 56), PAEVVHK (SEQ ID NO: 57), PAAVVQK (SEQ ID NO: 58), PAEVVQQ (SEQ ID NO: 59), TAEVVKK (SEQ ID NO: 60), PAEVLQK (SEQ ID NO: 61), or QAEEVQK (SEQ ID NO: 62). In some embodiments [N2]-[N3] is or comprises YPAEVVQK (SEQ ID NO: 943), YPPSLVQK (SEQ ID NO: 946), NKAEVVQK (SEQ ID NO: 947), YTAEVVQK (SEQ ID NO: 948), YPAEVEQK (SEQ ID NO: 949), YPAEEVQK (SEQ ID NO: 950), YQAEVVQK (SEQ ID NO: 951), YTPSLVQK (SEQ ID NO: 952), YPPSLEQK (SEQ ID NO: 953), YPPSLVKK (SEQ ID NO: 954), YPAEVVKK (SEQ ID NO: 955), YPAEVVHK (SEQ ID NO: 956), YPAAVVQK (SEQ ID NO: 957), NPAEVVQK (SEQ ID NO: 958), YPAEVVQQ (SEQ ID NO: 959), CPAEVVQK (SEQ ID NO: 960), YTAEVVKK (SEQ ID NO: 961), YPAEVLQK (SEQ ID NO: 962), or YQAEEVQK (SEQ ID NO: 963); an amino acid sequence comprising any portion of any of the aforesaid amino acid sequences (e.g., any 2, 3, 4, 5, 6, or 7 amino acids, e.g., consecutive amino acids) thereof; an amino acid sequence comprising one, two, or three but no more than four modifications, e.g., substitutions (e.g., conservative substitutions), insertions, or deletions, relative to any of the aforesaid amino acid sequences; or an amino acid sequence comprising one, two, or three but no more than four different amino acids, relative to any one of the aforesaid amino acid sequences. In some embodiments, [N2]-[N3] is YPAEVVQK (SEQ ID NO: 943). In some embodiments, [N2]-[N3] comprises the amino acid sequence YPAEVVQK (SEQ ID NO: 943).

[1065] In some embodiments, the peptide comprising the amino acid sequence comprising the formula of [N2]-[N3], further comprises [N1], which comprises positions X_{D}, X_{E}, and X_{F}. In some embodiments, position X_{D} of [N1] is Q, T, S, A, I, L, or H. In some embodiments, position X_{E} of [N1] is S, G, A, or R. In some embodiments, position X_{F} of [N1] is S, K, L, R, A, or T. In some embodiments, [N1] comprises SK, SL, SS, SR, GA, GS, AS, ST, RS, QS, TS, AG, IG, QA, LG, HS, LS, or QR. In some embodiments, [N1] is or comprises QSS, QSK, TSL, SSS, QSR, AGA, IGS, QAS, ASS, LGS, QST, HSS, LSS, or QRS. In some embodiments, the amino acid sequence of [N1] is QSS. In some embodiments, [N1]-[N2] comprises SSYPA (SEQ ID NO: 63), SKYPA (SEQ ID NO: 64), SLYPA (SEQ ID NO: 65), SRYPA (SEQ ID NO: 66), SSYPP (SEQ ID NO: 67), GAYPA (SEQ ID NO: 68), GSYPA (SEQ ID NO: 69), ASYPA (SEQ ID NO: 70), STNKA (SEQ ID NO: 71), SSYTA (SEQ ID NO: 72), SSYQA (SEQ ID NO: 73), SSYTP (SEQ ID NO: 74), SSNPA (SEQ ID NO: 75), SLCPA (SEQ ID NO: 76), RSYTA (SEQ ID NO: 77), or SSTHA (SEQ ID NO: 78). In some embodiments, [N1]-[N2] comprises SSYPAE (SEQ ID NO: 79), SKYPAE (SEQ ID NO: 80), SLYPAE (SEQ ID NO: 81), SRYPAE (SEQ ID NO: 82), SSYPPS (SEQ ID NO: 83), GAYPAE (SEQ ID NO: 84), GSYPAE (SEQ ID NO: 85), ASYPAE (SEQ ID NO: 86), STNKAE (SEQ ID NO: 87), SSYTAE (SEQ ID NO: 88), SSYQAE (SEQ ID NO: 89), SSYTPS (SEQ ID NO: 90), SSYPAA (SEQ ID NO: 91), SSNPAE (SEQ ID NO: 92), SLCPAE (SEQ ID NO: 93), RSYTAE (SEQ ID NO: 94), SSTHAS (SEQ ID NO: 95). In some embodiments, [N1]-[N2] is or comprises QSSYPAEV (SEQ ID NO: 96), QSKYPAEV (SEQ ID NO: 97), TSLYPAEV (SEQ ID NO: 98), SSSYPAEV (SEQ ID NO: 99), QSRYPAEV (SEQ ID NO: 100), QSSYPPSL (SEQ ID NO: 101), AGAYPAEV (SEQ ID NO: 102), IGSYPAEV (SEQ ID NO: 103), QASYPAEV (SEQ ID NO: 104), ASSYPAEV (SEQ ID NO: 105), LGSYPAEV (SEQ ID NO: 106), QSTNKAEV (SEQ ID NO: 107), HSSYPAEV (SEQ ID NO: 108), SSSYTAEV (SEQ ID NO: 109), TSLYPAEE (SEQ ID NO: 110), ASSYQAEV (SEQ ID NO: 111), QSSYTPSL (SEQ ID NO: 112), QSRYPAEE (SEQ ID NO: 113), LSSYQAEV (SEQ ID NO: 114), HSSYPAAV (SEQ ID NO: 115), QSSNPAEV (SEQ ID NO: 116), QSSYTAEV (SEQ ID NO: 117), TSLCPAEV (SEQ ID NO: 118), QRSYTAEV (SEQ ID NO: 119), or QSSYQAEE (SEQ ID NO: 120); an amino acid sequence comprising any portion of any of the aforesaid amino acid sequences (e.g., any 2, 3, 4, 5, 6, or 7 amino acids, e.g., consecutive amino acids) thereof; an amino acid sequence comprising one, two, or three but no more than four modifications, e.g., substitutions (e.g., conservative substitutions), insertions, or deletions, relative to any of the aforesaid amino acid sequences; or an amino acid sequence comprising one, two, or three but no more than four different amino acids, relative to any one of the aforesaid amino acid sequences. In some embodiments, the amino acid sequence of [N1]-[N2] is QSSYPAEV (SEQ ID NO: 96). In some embodiments, [N1]-[N2]-[N3] comprises SSYPAEVVQ (SEQ ID NO: 121), SKYPAEVVQ (SEQ ID NO: 122), SLYPAEVVQ (SEQ ID NO: 123), SRYPAEVVQ (SEQ ID NO: 124), SSYPPSLVQ (SEQ ID NO: 125), GAYPAEVVQ (SEQ ID NO: 126), GSYPAEVVQ (SEQ ID NO: 127), ASYPAEVVQ (SEQ ID NO: 128), STNKAEVVQ (SEQ ID NO: 129), SSYTAEVVQ (SEQ ID NO: 130), SKYPAEVEQ (SEQ ID NO: 131), SLYPAEEVQ (SEQ ID NO: 132), SSYQAEVVQ (SEQ ID NO: 133), SSYTPSLVQ (SEQ ID NO: 134), SRYPAEEVQ (SEQ ID NO: 135), SSYPPSLEQ (SEQ ID NO: 136), SSYPPSLVK (SEQ ID NO: 140), SSYPAEVVK (SEQ ID NO: 141), SKYPAEVVH (SEQ ID NO: 142), SSYPAAVVQ (SEQ ID NO: 143), SSNPAEVVQ (SEQ ID NO: 144), SLCPAEVVQ (SEQ ID NO: 145), RSYTAEVVQ (SEQ ID NO: 146), SSYTAEVVK (SEQ ID NO: 147), SSYPAEVLQ (SEQ ID NO: 148), or SSYQAEEVQ (SEQ ID NO: 149). In some embodiments, [N1]-[N2]-[N3] is or comprises QSSYPAEVVQK (SEQ ID NO: 150), QSKYPAEVVQK (SEQ ID NO: 151), TSLYPAEVVQK (SEQ ID NO: 152), SSSYPAEVVQK (SEQ ID NO: 153), QSRYPAEVVQK (SEQ ID NO: 154), QSSYPPSLVQK (SEQ ID NO: 155), AGAYPAEVVQK (SEQ ID NO: 156), IGSYPAEVVQK (SEQ ID NO: 157), QASYPAEVVQK (SEQ ID NO: 158), ASSYPAEVVQK (SEQ ID NO: 159), LGSYPAEVVQK (SEQ ID NO: 160), QSTNKAEVVQK (SEQ ID NO: 161), HSSYPAEVVQK (SEQ ID NO: 162), SSSYTAEVVQK (SEQ ID NO: 163), QSKYPAEVEQK (SEQ ID NO: 164), TSLYPAEEVQK (SEQ ID NO: 165), ASSYQAEVVQK (SEQ ID NO: 166), QSSYTPSLVQK (SEQ ID NO: 167), QSRYPAEEVQK (SEQ ID NO: 168), QSSYPPSLEQK (SEQ ID NO: 169), QSSYPPSLVKK (SEQ ID NO: 170), LSSYQAEVVQK (SEQ ID NO: 171), SSSYPAEVVKK (SEQ ID NO: 172), QSKYPAEVVHK (SEQ ID NO: 173), HSSYPAAVVQK (SEQ ID NO: 174), QSSNPAEVVQK (SEQ ID NO: 175), SSSYPAEVVQQ (SEQ ID NO: 176), QSSYTAEVVQK (SEQ ID NO: 177), TSLCPAEVVQK (SEQ ID NO: 178), QRSYTAEVVQK (SEQ ID NO: 179), QSSYTAEVVKK (SEQ ID NO: 180), HSSYPAEVLQK (SEQ ID NO: 181), or QSSYQAEEVQK (SEQ ID NO: 182); an amino acid sequence comprising any portion of any of the aforesaid amino acid sequences (e.g., any 2, 3, 4, 5, 6, 7, 8, 9, or 10 amino acids, e.g., consecutive amino acids) thereof; an amino acid sequence comprising one, two, or three but no more than four modifications, e.g., substitutions (e.g., conservative substitutions), insertions, or deletions, relative to any of the aforesaid amino acid sequences; or an amino acid sequence comprising one, two, or three but no more than four different amino acids, relative to any one of the aforesaid amino acid sequences. In some embodiments, the amino acid sequence of [N1]-[N2]-[N3] is QSSYPAEVVQK (SEQ ID NO: 150).

[1066] In some embodiments, the peptide comprising the amino acid sequence comprising the formula [N2]-[N3], further comprises [N0], wherein [N0] comprises positions X_{A}, X_{B}, and X_{C}. In some embodiments, position X_{A} of [N0] is T, I, or N. In some embodiments, positions X_{B} of [N0] is N. In some embodiments, position X_{C} of [N0] is N, T, S, or K. In some embodiments, [N0] comprises TN, IN, NN, NT, NS, or NK. In some embodiments, [N0] is or comprises TNN, TNT, INN, TNS, NNN, or TNK. In some embodiments, the amino acid sequence of [N0] is TNN. In some embodiments, [N0]-[N1] is or comprises TNNQSS (SEQ ID NO: 183), TNNQSK (SEQ ID NO: 184), TNNTSL (SEQ ID NO: 185), TNNSSS (SEQ ID NO: 186), TNNQSR (SEQ ID NO: 187), TNNAGA (SEQ ID NO: 188), TNNIGS (SEQ ID NO: 189), TNNQAS (SEQ ID NO: 190), TNTASS (SEQ ID NO: 191), TNNLGS (SEQ ID NO: 192), TNNQST (SEQ ID NO: 193), TNNHSS (SEQ ID NO: 194), TNNQSK (SEQ ID NO: 184), TNNLSS (SEQ ID NO: 195), INNQSS (SEQ ID NO: 196), TNSQSS (SEQ ID NO: 197), NNNQSR (SEQ ID NO: 198), TNSTSL (SEQ ID NO: 199), TNNQRS (SEQ ID NO: 200), or TNKQAS (SEQ ID NO: 201); an amino acid sequence comprising any portion of any of the aforesaid amino acid sequences (e.g., any 2, 3, 4, or 5 amino acids, e.g., consecutive amino acids) thereof; an amino acid sequence comprising one, two, or three but no more than four modifications, e.g., substitutions (e.g., conservative substitutions), insertions, or deletions, relative to any of the aforesaid amino acid sequences; or an amino acid sequence comprising one, two, or three but no more than four different amino acids, relative to any one of the aforesaid amino acid sequences. In some embodiments, [N0]-[N1] is TNNQSS (SEQ ID NO: 183). In some embodiments, [N0]-[N1]-[N2]-[N3] is or comprises TNNQSSYPAEVVQK (SEQ ID NO: 500), TNNQSKYPAEVVQK (SEQ ID NO: 503), TNNTSLYPAEVVQK (SEQ ID NO: 506), TNNSSSYPAEVVQK (SEQ ID NO: 508), TNNQSRYPAEVVQK (SEQ ID NO: 510), TNNQSSYPPSLVQK (SEQ ID NO: 512), TNNAGAYPAEVVQK (SEQ ID NO: 513), TNNIGSYPAEVVQK (SEQ ID NO: 514), TNNQASYPAEVVQK (SEQ ID NO: 517), TNTASSYPAEVVQK (SEQ ID NO: 520), TNNLGSYPAEVVQK (SEQ ID NO: 523), TNNQSTNKAEVVQK (SEQ ID NO: 524), TNNHSSYPAEVVQK (SEQ ID NO: 525), TNNSSSYTAEVVQK (SEQ ID NO: 526), TNNQSKYPAEVEQK (SEQ ID NO: 529), TNNTSLYPAEEVQK (SEQ ID NO: 530), TNTASSYQAEVVQK (SEQ ID NO: 531), TNNQSSYTPSLVQK (SEQ ID NO: 533), TNNQSRYPAEEVQK (SEQ ID NO: 534), TNNQSSYPPSLEQK (SEQ ID NO: 535), TNNQSSYPPSLVKK (SEQ ID NO: 536), TNNLSSYQAEVVQK (SEQ ID NO: 539), TNNSSSYPAEVVKK (SEQ ID NO: 540), TNNQSKYPAEVVHK (SEQ ID NO: 542), INNQSSYPAEVVQK (SEQ ID NO: 543), TNNHSSYPAAVVQK (SEQ ID NO: 545), TNSQSSNPAEVVQK (SEQ ID NO: 548), TNNSSSYPAEVVQQ (SEQ ID NO: 551), NNNQSRYPAEVVQK (SEQ ID NO: 552), TNNQSSYTAEVVQK (SEQ ID NO: 553), TNNTSLCPAEVVQK (SEQ ID NO: 554), TNSTSLYPAEVVQK (SEQ ID NO: 556), TNNQRSYTAEVVQK (SEQ ID NO: 557), TNNQSSYTAEVVKK (SEQ ID NO: 558), TNNHSSYPAEVLQK (SEQ ID NO: 560), TNNQSSYQAEEVQK (SEQ ID NO: 562) or TNKQASYPAEVVQK (SEQ ID NO: 563); an amino acid sequence comprising any portion of any of the aforesaid amino acid sequences (e.g., any 2, 3, 4, 5, 6, 7, 8, 9, 10, 11, 12, or 13 amino acids, e.g., consecutive amino acids) thereof; an amino acid sequence comprising one, two, or three but no more than four modifications, e.g., substitutions (e.g., conservative substitutions), insertions, or deletions, relative to any of the aforesaid amino acid sequences; or an amino acid sequence comprising one, two, or three but no more than four different amino acids, relative to any one of the aforesaid amino acid sequences. In some embodiments, [N0]-[N1]-[N2]-[N3] is TNNQSSYPAEVVQK (SEQ ID NO: 500).

[1067] In some embodiments, the peptide comprising the amino acid sequence comprising the formula [N2]-[N3], further comprises [N4], which comprises positions X_{G} and X_{H}. In some embodiments, position X_{G} of [N4] is T, P, or N. In some embodiments, position X_{G} of [N4] is T. In some embodiments, position X_{H} of [N4] is A. In some embodiments, [N4] is or comprises TA, PA, or NA. In some embodiments, [N4] is TA. In some embodiments, [N3]-[N4] is or comprises VQKTA (SEQ ID NO: 564), EQKTA (SEQ ID NO: 565), VKKTA (SEQ ID NO: 566), VQKPA (SEQ ID NO: 567), VHKTA (SEQ ID NO: 568), VQQTA (SEQ ID NO: 569), VQKNA (SEQ ID NO: 570), or LQKTA (SEQ ID NO: 571); an amino acid sequence comprising any portion of any of the aforesaid amino acid sequences (e.g., any 2, 3, or 4 amino acids, e.g., consecutive amino acids) thereof; an amino acid sequence comprising one, two, or three but no more than four modifications, e.g., substitutions (e.g., conservative substitutions), insertions, or deletions, relative to any of the aforesaid amino acid sequences; or an amino acid sequence comprising one, two, or three but no more than four different amino acids, relative to any one of the aforesaid amino acid sequences. In some embodiments, [N3]-[N4] is VQKTA (SEQ ID NO: 564). In some embodiments, [N0]-[N1]-[N2]-[N3]-[N4] is or comprises TNNQSSYPAEVVQKTA (SEQ ID NO: 1533), TNNQSKYPAEVVQKTA (SEQ ID NO: 1538), TNNTSLYPAEVVQKTA (SEQ ID NO: 1232), TNNSSSYPAEVVQKTA (SEQ ID NO: 1539), TNNQSRYPAEVVQKTA (SEQ ID NO: 1327), TNNQSSYPPSLVQKTA (SEQ ID NO: 1300), TNNAGAYPAEVVQKTA (SEQ ID NO: 1021), TNNIGSYPAEVVQKTA (SEQ ID NO: 1112), TNNQASYPAEVVQKTA (SEQ ID NO: 1194), TNTASSYPAEVVQKTA (SEQ ID NO: 1575), TNNLGSYPAEVVQKTA (SEQ ID NO: 1027), TNNQSTNKAEVVQKTA (SEQ ID NO: 1578), TNNHSSYPAEVVQKTA (SEQ ID NO: 1310), TNNQSKYPAEVVQKTA (SEQ ID NO: 1538), TNNSSSYTAEVVQKTA (SEQ ID NO: 1214), TNNQSKYPAEVEQKTA (SEQ ID NO: 1254), TNNTSLYPAEEVQKTA (SEQ ID NO: 1583), TNTASSYQAEVVQKTA (SEQ ID NO: 1584), TNNQSSYTPSLVQKTA (SEQ ID NO: 1585), TNNQSRYPAEEVQKTA (SEQ ID NO: 1342), TNNQSSYPPSLEQKTA (SEQ ID NO: 1590), TNNQSSYPPSLVKKTA (SEQ ID NO: 1591), TNNLSSYQAEVVQKTA (SEQ ID NO: 1592), TNNQSSYPPSLVQKPA (SEQ ID NO: 1593), TNNSSSYPAEVVKKTA (SEQ ID NO: 1331), TNNQSKYPAEVVHKTA (SEQ ID NO: 1453), TNNSSSYPAEVVQKPA (SEQ ID NO: 1142), INNQSSYPAEVVQKTA (SEQ ID NO: 1024), TNNHSSYPAAVVQKTA (SEQ ID NO: 1598), TNSQSSNPAEVVQKTA (SEQ ID NO: 1599), TNNSSSYPAEVVQQTA (SEQ ID NO: 1419), NNNQSRYPAEVVQKTA (SEQ ID NO: 1601), TNNQSSYTAEVVQKNA (SEQ ID NO: 1602), TNNTSLCPAEVVQKTA (SEQ ID NO: 1603), TNSTSLYPAEVVQKTA (SEQ ID NO: 1605), TNNQRSYTAEVVQKTA (SEQ ID NO: 1604), TNNQSSYTAEVVKKTA (SEQ ID NO: 1606), TNNHSSYPAEVLQKTA (SEQ ID NO: 1607), TNNQSSYQAEEVQKTA (SEQ ID NO: 1608), or TNKQASYPAEVVQKTA (SEQ ID NO: 1587); an amino acid sequence comprising any portion of any of the aforesaid amino acid sequences (e.g., any 2, 3, 4, 5, 6, 7, 8, 9, 10, 11, 12, 13, 14, or 15 amino acids, e.g., consecutive amino acids) thereof; an amino acid sequence comprising one, two, or three but no more than four modifications, e.g., substitutions (e.g., conservative substitutions), insertions, or deletions, relative to any of the aforesaid amino acid sequences; or an amino acid sequence comprising one, two, or three but no more than four different amino acids, relative to any one of the aforesaid amino acid sequences. In some embodiments, [N0]-[N1]-[N2]-[N3]-[N4] is TNNQSSYPAEVVQKTA (SEQ ID NO: 1533).

[1068] In some embodiments, a peptide described herein comprises the formula [N2]-[N3], wherein [N2] comprises positions X1, X2, X3, X4, and X5 and [N3] comprises the amino acid sequence of VQK or VQN. In some embodiments, [N3] comprises the amino acid sequence VQK. In some embodiments, position X1 of [N2] is Y or T. In some embodiments, position X2 of [N2] is Q, T, P, or E. In some embodiments, position X3 of [N2] is A. In some embodiments, position X4 of [N2] is E or D. In some embodiments, position X4 of [N2] is E or D. In some embodiments, position X5 of [N2] is V or E. In some embodiments, [N2] comprises Y at position X1. In some embodiments, [N2] comprises P at position X2. In some embodiments, [N2] comprises A at position X3. In some embodiments, [N2] comprises E at position X4. In some embodiments, [N2] comprises V at position X5. In some embodiments, [N2] comprises YP, YQ, YT, TE, QA, TA, PA, EA, EV, EE, DV, AE, or AD. In some embodiments, [N2] comprises YPA, YQA, YTA, TEA, QAE, TAE, PAE, EAE, PAD, AEV, AEE, or ADV. In some embodiments, [N2] comprises YPAE (SEQ ID NO: 21), YQAE (SEQ ID NO: 25), YTAE (SEQ ID NO: 24), TEAE (SEQ ID NO: 587), YPAD (SEQ ID NO: 588), QAEV (SEQ ID NO: 15), TAEV (SEQ ID NO: 16), PAEV (SEQ ID NO: 17), PAEE (SEQ ID NO: 18), EAEV (SEQ ID NO: 590), or PADV (SEQ ID NO: 19). In some embodiments, [N2] is or comprises YPAEV (SEQ ID NO: 1), YQAEV (SEQ ID NO: 6), YTAEV (SEQ ID NO: 4), YPAEE (SEQ ID NO: 5), TEAEV (SEQ ID NO: 12), or YPADV (SEQ ID NO: 13). In some embodiments, [N2] is YPAEV (SEQ ID NO: 1). In some embodiments, [N2]-[N3] comprises AEVVQK (SEQ ID NO: 36), AEEVQK (SEQ ID NO: 39), AEVVQN (SEQ ID NO: 591), or ADVVQK (SEQ ID NO: 593). In some embodiments, [N2]-[N3] comprises PAEVVQN (SEQ ID NO: 594), QAEVVQK (SEQ ID NO: 52), TAEVVQK (SEQ ID NO: 49), PAEVVQK (SEQ ID NO: 20), PAEEVQK (SEQ ID NO: 51), EAEVVQK (SEQ ID NO: 595), or PADVVQK (SEQ ID NO: 596). In some embodiments, [N2]-[N3] is or comprises YPAEVVQK (SEQ ID NO: 943), YQAEVVQK (SEQ ID NO: 951), YTAEVVQK (SEQ ID NO: 948), YPAEEVQK (SEQ ID NO: 950), YPAEVVQN (SEQ ID NO: 964), TEAEVVQK (SEQ ID NO: 965), or YPADVVQK (SEQ ID NO: 966); an amino acid sequence comprising any portion of any of the aforesaid amino acid sequences (e.g., any 2, 3, 4, 5, 6, or 7 amino acids, e.g., consecutive amino acids) thereof; an amino acid sequence comprising one, two, or three but no more than four modifications, e.g., substitutions (e.g., conservative substitutions), insertions, or deletions, relative to any of the aforesaid amino acid sequences; or an amino acid sequence comprising one, two, or three but no more than four different amino acids, relative to any one of the aforesaid amino acid sequences. In some embodiments, [N2]-[N3] is YPAEVVQK (SEQ ID NO: 943).

[1069] In some embodiments, the peptide comprising the amino acid sequence comprising the formula of [N2]-[N3], further comprises [N1], which comprises positions X_{D}, X_{E}, and X_{F}. In some embodiments, position X_{D} of [N1] is Q or S. In some embodiments, position X_{E} of [N1] is S, L, A, or T. In some embodiments, position X_{F} of [N1] is S, Y, or T. In some embodiments, [N1] comprises QS, SL, SA, QT, LS, LY, AT, TS, or SS. In some embodiments, [N1] is or comprises QSS, SLS, SLY, SAT, or QTS. In some embodiments, [N1] is QSS. In some embodiments, [N1]-[N2] comprises SSYPA (SEQ ID NO: 63), LSYQA (SEQ ID NO: 597), LSYTA (SEQ ID NO: 598), LYYPA (SEQ ID NO: 600), ATYPA (SEQ ID NO: 601), LSYPA (SEQ ID NO: 603), or TSTEA (SEQ ID NO: 605). In some embodiments, [N1]-[N2] comprises SSYPAE (SEQ ID NO: 79), LSYQAE (SEQ ID NO: 607), LSYTAE (SEQ ID NO: 610), LYYPAE (SEQ ID NO: 611), ATYPAE (SEQ ID NO: 613), LSYPAE (SEQ ID NO: 616), TSTEAE (SEQ ID NO: 619), or LSYPAD (SEQ ID NO: 621). In some embodiments, [N1]-[N2] is or comprises QSSYPAEV (SEQ ID NO: 96), SLSYQAEV (SEQ ID NO: 622), SLSYTAEV (SEQ ID NO: 623), SLYYPAEV (SEQ ID NO: 624), SATYPAEV (SEQ ID NO: 625), SLSYPAEV (SEQ ID NO: 629), SLSYPAEE (SEQ ID NO: 632), QTSTEAEV (SEQ ID NO: 633), or SLSYPADV (SEQ ID NO: 634); an amino acid sequence comprising any portion of any of the aforesaid amino acid sequences (e.g., any 2, 3, 4, 5, 6, or 7 amino acids, e.g., consecutive amino acids) thereof; an amino acid sequence comprising one, two, or three but no more than four modifications, e.g., substitutions (e.g., conservative substitutions), insertions, or deletions, relative to any of the aforesaid amino acid sequences; or an amino acid sequence comprising one, two, or three but no more than four different amino acids, relative to any one of the aforesaid amino acid sequences. In some embodiments, [N1]-[N2] is QSSYPAEV (SEQ ID NO: 96). In some embodiments, [N1]-[N2]-[N3] is or comprises QSSYPAEVVQK (SEQ ID NO: 150), SLSYQAEVVQK (SEQ ID NO: 635), SLSYTAEVVQK (SEQ ID NO: 637), SLYYPAEVVQK (SEQ ID NO: 639), SATYPAEVVQK (SEQ ID NO: 641), SLSYPAEVVQK (SEQ ID NO: 642), SLSYPAEEVQK (SEQ ID NO: 643), SLSYPAEVVQN (SEQ ID NO: 644), QTSTEAEVVQK (SEQ ID NO: 645), or SLSYPADVVQK (SEQ ID NO: 646); an amino acid sequence comprising any portion of any of the aforesaid amino acid sequences (e.g., any 2, 3, 4, 5, 6, 7, 8, 9, or 10 amino acids, e.g., consecutive amino acids) thereof; an amino acid sequence comprising one, two, or three but no more than four modifications, e.g., substitutions (e.g., conservative substitutions), insertions, or deletions, relative to any of the aforesaid amino acid sequences; or an amino acid sequence comprising one, two, or three but no more than four different amino acids, relative to any one of the aforesaid amino acid sequences. In some embodiments, [N1]-[N2]-[N3] is QSSYPAEVVQK (SEQ ID NO: 150).

[1070] In some embodiments, the peptide comprising the amino acid sequence comprising the formula [N2]-[N3], further comprises [N0], wherein [N0] comprises positions X_{A}, X_{B}, and X_{C}. In some embodiments, position X_{A} of [N0] is T. In some embodiments, positions X_{B} of [N0] is N. In some embodiments, position X_{C} of [N0] is N, T, S, or K. In some embodiments [N0] comprises TN, NS, NT, NN, or NK. In some embodiments, [N0] is or comprises TNS, TNT, TNN, or TNK. In some embodiment, [N0] is TNN. In some embodiments, [N0]-[N1] is or comprises TNNQSS (SEQ ID NO: 183), TNSSLS (SEQ ID NO: 647), TNSSLY (SEQ ID NO: 648), TNTSAT (SEQ ID NO: 649), TNNQTS (SEQ ID NO: 650), or TNKSAT (SEQ ID NO: 651); an amino acid sequence comprising any portion of any of the aforesaid amino acid sequences (e.g., any 2, 3, 4, or 5 amino acids, e.g., consecutive amino acids) thereof; an amino acid sequence comprising one, two, or three but no more than four modifications, e.g., substitutions (e.g., conservative substitutions), insertions, or deletions, relative to any of the aforesaid amino acid sequences; or an amino acid sequence comprising one, two, or three but no more than four different amino acids, relative to any one of the aforesaid amino acid sequences. In some embodiments, [N0]-[N1] is TNNQSS (SEQ ID NO: 183). In some embodiments, [N0]-[N1]-[N2]-[N3] is or comprises TNNQSSYPAEVVQK (SEQ ID NO: 500), TNSSLSYQAEVVQK (SEQ ID NO: 652), TNSSLSYTAEVVQK (SEQ ID NO: 654), TNSSLYYPAEVVQK (SEQ ID NO: 655), TNTSATYPAEVVQK (SEQ ID NO: 656), TNSSLSYPAEVVQK (SEQ ID NO: 657), TNSSLSYPAEEVQK (SEQ ID NO: 658), TNSSLSYPAEVVQN (SEQ ID NO: 660), TNNQTSTEAEVVQK (SEQ ID NO: 662), TNKSATYPAEVVQK (SEQ ID NO: 663), or TNSSLSYPADVVQK (SEQ ID NO: 665); an amino acid sequence comprising any portion of any of the aforesaid amino acid sequences (e.g., any 2, 3, 4, 5, 6, 7, 8, 9, 10, 11, 12, or 13 amino acids, e.g., consecutive amino acids) thereof; an amino acid sequence comprising one, two, or three but no more than four modifications, e.g., substitutions (e.g., conservative substitutions), insertions, or deletions, relative to any of the aforesaid amino acid sequences; or an amino acid sequence comprising one, two, or three but no more than four different amino acids, relative to any one of the aforesaid amino acid sequences. In some embodiments, [N0]-[N1]-[N2]-[N3] is TNNQSSYPAEVVQK (SEQ ID NO: 500).

[1071] In some embodiments, the peptide comprising the amino acid sequence comprising the formula [N2]-[N3], further comprises [N4], which comprises positions X_{G} and X_{H}. In some embodiments, position X_{G} of [N4] is T, P, or N. In some embodiments, position X_{H} of [N4] is A or D. In some embodiments, [N4] is or comprises TA, TD, PA, or NA. In some embodiments, [N4] is TA. In some embodiments, [N3]-[N4] is or comprises VQKTA (SEQ ID NO: 564), EQKTA (SEQ ID NO: 565), VKKTA (SEQ ID NO: 566), VQKPA (SEQ ID NO: 567), VHKTA (SEQ ID NO: 568), VQQTA (SEQ ID NO: 569), VQKNA (SEQ ID NO: 570), or LQKTA (SEQ ID NO: 571); an amino acid sequence comprising any portion of any of the aforesaid amino acid sequences (e.g., any 2, 3, or 4 amino acids, e.g., consecutive amino acids) thereof; an amino acid sequence comprising one, two, or three but no more than four modifications, e.g., substitutions (e.g., conservative substitutions), insertions, or deletions, relative to any of the aforesaid amino acid sequences; or an amino acid sequence comprising one, two, or three but no more than four different amino acids, relative to any one of the aforesaid amino acid sequences. In some embodiments, [N3]-[N4] is VQKTA (SEQ ID NO: 564). In some embodiments, [N0]-[N1]-[N2]-[N3]-[N4] is or comprises

(SEQ ID NO: 1533)
TNNQSSYPAEVVQKTA,
(SEQ ID NO: 2064)
TNSSLSYQAEVVQKTA,
(SEQ ID NO: 2065)
TNSSLSYTAEVVQKTA,
(SEQ ID NO: 2066)
TNSSLYYPAEVVQKTA,
(SEQ ID NO: 2067)
TNTSATYPAEVVQKTA,
(SEQ ID NO: 2068)
TNSSLSYPAEVVQKTA,
(SEQ ID NO: 2069)
TNSSLSYPAEEVQKTA,
(SEQ ID NO: 2070)
TNSSLSYPAEVVQKTD,
(SEQ ID NO: 2071)
TNSSLSYPAEVVQNTA,
(SEQ ID NO: 2072)
TNSSLSYPAEVVQKNA,
(SEQ ID NO: 2073)
TNSSLSYPAEVVQKPA,
(SEQ ID NO: 2074)
TNNQTSTEAEVVQKTA,
(SEQ ID NO: 2075)
TNKSATYPAEVVQKTA,
or
(SEQ ID NO: 2076)
TNSSLSYPADVVQKTA;

an amino acid sequence comprising any portion of any of the aforesaid amino acid sequences (e.g., any 2, 3, 4, 5, 6, 7, 8, 9, 10, 11, 12, 13, 14, or 15 amino acids, e.g., consecutive amino acids) thereof; an amino acid sequence comprising one, two, or three but no more than four modifications, e.g., substitutions (e.g., conservative substitutions), insertions, or deletions, relative to any of the aforesaid amino acid sequences; or an amino acid sequence comprising one, two, or three but no more than four different amino acids, relative to any one of the aforesaid amino acid sequences. In some embodiments, [N0]-[N1]-[N2]-[N3]-[N4] is TNNQSSYPAEVVQKTA (SEQ ID NO: 1533).

[1072] In some embodiments, [N1] is present immediately subsequent to [N0]. In some embodiments, [N2] is present immediately subsequent to [N1]. In some embodiments, [N3] is present immediately subsequent to [N2]. In some embodiments, [N4] is present immediately subsequent to [N3]. In some embodiments, the peptide comprises from N-terminus to C-terminus, [N2]-[N3]. In some embodiments, the peptide comprises from N-terminus to C-terminus, [N1]-[N2]-[N3]. In some embodiments, the peptide comprises from N-terminus to C-terminus, [N1]-[N2]-[N3]-[N4]. In some embodiments, the peptide comprises from N-terminus to C-terminus, [N0]-[N1]-[N2]-[N3]. In some embodiments, the peptide comprises from N-terminus to C-terminus, [N0]-[N1]-[N2]-[N3]-[N4].

[1073] In some embodiments, a peptide described herein comprises an amino acid sequence having the formula [B]-[C], wherein [B] comprises positions X1, X2, and X3, and [C] comprises the amino acid sequence YPAEVVQK (SEQ ID NO: 943). In some embodiments, position X1 of [B] X1 is Q, T, S, A, I, L, or H. In some embodiments, position X1 of [B] X1 is Q, T, S, A, or H. In some embodiments, position X2 of [B] is S, G, or A. In some embodiments, position X2 of [B] is S or G. In some embodiments, position X3 of [B] is S, K, L, R, or A. In some embodiments, position X3 of [B] is S, K, L, or R. In some embodiments, [B] comprises Q at position X1. In some embodiments, [B] comprises S at position X2. In some embodiments, [B] comprises S at position X3. In some embodiments, [B] comprises QS, TS, SS, AG, IG, QA, AS, LG, HS, SK, SL, SR, GA, or GS. In some embodiments, [B] is or comprises QSS, TSL, SSS, QSR, QSK, AGA, IGS, QAS, ASS, LGS, or HSS. In some embodiments, the amino acid sequence of [B] is QSS. In some embodiments, [B]-[C] comprises SSYPAEVVQK (SEQ ID NO: 572), SKYPAEVVQK (SEQ ID NO: 573), SLYPAEVVQK (SEQ ID NO: 574), SRYPAEVVQK (SEQ ID NO: 575), GAYPAEVVQK (SEQ ID NO: 576), GSYPAEVVQK (SEQ ID NO: 580), or ASYPAEVVQK (SEQ ID NO: 582). In some embodiments, [B]-[C] is or comprises QSSYPAEVVQK (SEQ ID NO: 150), QSKYPAEVVQK (SEQ ID NO: 151), TSLYPAEVVQK (SEQ ID NO: 152), SSSYPAEVVQK (SEQ ID NO: 153), QSRYPAEVVQK (SEQ ID NO: 154), AGAYPAEVVQK (SEQ ID NO: 156), IGSYPAEVVQK (SEQ ID NO: 157), QASYPAEVVQK (SEQ ID NO: 158), ASSYPAEVVQK (SEQ ID NO: 159), LGSYPAEVVQK (SEQ ID NO: 160), or HSSYPAEVVQK (SEQ ID NO: 162); an amino acid sequence comprising any portion of any of the aforesaid amino acid sequences (e.g., any 2, 3, 4, 5, 6, 7, 8, 9, or 10 amino acids, e.g., consecutive amino acids) thereof; an amino acid sequence comprising one, two, or three but no more than four modifications, e.g., substitutions (e.g., conservative substitutions), insertions, or deletions, relative to any of the aforesaid amino acid sequences; or an amino acid sequence comprising one, two, or three but no more than four different amino acids, relative to any one of the aforesaid amino acid sequences. In some embodiments, [B]-[C] is QSSYPAEVVQK (SEQ ID NO: 150).

[1074] In some embodiments, a peptide comprising the formula [B]-[C], further comprises [A], which comprises positions X_{A}, X_{B}, and X_{C}. In some embodiments, position X_{A} of [A] is T, I, or N. In some embodiments, position X_{B} of [A] is N. In some embodiments, position X_{C} of [A] is N, T, S, or K. In some embodiments, [A] comprises TN, IN, NN, NT, NS, or NK. In some embodiments, [A] is or comprises TNN, TNT, INN, NNN, TNS, or TNK. In some embodiments, [A] is TNN. In some embodiments, [A]-[B] is or comprises TNNQSS (SEQ ID NO: 183), TNNQSK (SEQ ID NO: 184), TNNTSL (SEQ ID NO: 185), TNNSSS (SEQ ID NO: 186), TNNQSR (SEQ ID NO: 187), TNNAGA (SEQ ID NO: 188), TNNIGS (SEQ ID NO: 189), TNNQAS (SEQ ID NO: 190), TNTASS (SEQ ID NO: 191), TNNLGS (SEQ ID NO: 192), TNNHSS (SEQ ID NO: 194), INNQSS (SEQ ID NO: 196), NNNQSR (SEQ ID NO: 198), TNSTSL (SEQ ID NO: 199), or TNKQAS (SEQ ID NO: 201); an amino acid sequence comprising any portion of any of the aforesaid amino acid sequences (e.g., any 2, 3, 4, or 5 amino acids, e.g., consecutive amino acids) thereof; an amino acid sequence comprising one, two, or three but no more than four modifications, e.g., substitutions (e.g., conservative substitutions), insertions, or deletions, relative to any of the aforesaid amino acid sequences; or an amino acid sequence comprising one, two, or three but no more than four different amino acids, relative to any one of the aforesaid amino acid sequences. In some embodiments, the amino acid sequence of [A]-[B] is TNNQSS (SEQ ID NO: 183). In some embodiments, [A]-[B]-[C] is or comprises TNNQSSYPAEVVQK (SEQ ID NO: 500), TNNQSKYPAEVVQK (SEQ ID NO: 503), TNNTSLYPAEVVQK (SEQ ID NO: 506), TNNSSSYPAEVVQK (SEQ ID NO: 508), TNNQSRYPAEVVQK (SEQ ID NO: 510), TNNAGAYPAEVVQK (SEQ ID NO: 513), TNNIGSYPAEVVQK (SEQ ID NO: 514), TNNQASYPAEVVQK (SEQ ID NO: 517), TNTASSYPAEVVQK (SEQ ID NO: 520), TNNLGSYPAEVVQK (SEQ ID NO: 523), TNNHSSYPAEVVQK (SEQ ID NO: 525), INNQSSYPAEVVQK (SEQ ID NO: 543), NNNQSRYPAEVVQK (SEQ ID NO: 552), TNSTSLYPAEVVQK (SEQ ID NO: 556), or TNKQASYPAEVVQK (SEQ ID NO: 563); an amino acid sequence comprising any portion of any of the aforesaid amino acid sequences (e.g., any 2, 3, 4, 5, 6, 7, 8, 9, 10, 11, 12, or 13 amino acids, e.g., consecutive amino acids) thereof; an amino acid sequence comprising one, two, or three but no more than four modifications, e.g., substitutions (e.g., conservative substitutions), insertions, or deletions, relative to any of the aforesaid amino acid sequences; or an amino acid sequence comprising one, two, or three but no more than four different amino acids, relative to any one of the aforesaid amino acid sequences. In some embodiments, [A]-[B] is TNNQSS (SEQ ID NO: 183). In some embodiments, [A]-[B]-[C] is TNNQSSYPAEVVQK (SEQ ID NO: 500).

[1075] In some embodiments, a peptide comprising the formula [B]-[C], further comprises [D], wherein [D] comprises position X4 and X5. In some embodiments, position X4 of [D] is T or N. In some embodiments, position X5 of [D] is A. In some embodiments [D] is or comprises TA or PA. In some embodiments, the amino acid sequence of [D] is TA. In some embodiments, [C]-[D] is or comprises YPAEVVQKTA (SEQ ID NO: 584) or YPAEVVQKPA (SEQ ID NO: 586); an amino acid sequence comprising any portion of any of the aforesaid amino acid sequences (e.g., any 2, 3, 4, 5, 6, 7, 8, or 9 amino acids, e.g., consecutive amino acids) thereof; an amino acid sequence comprising one, two, or three but no more than four modifications, e.g., substitutions (e.g., sequences; or an amino acid sequence comprising one, two, or three but no more than four different amino acids, relative to any one of the aforesaid amino acid sequences. In some embodiments, the amino acid sequence of [C]-[D] is YPAEVVQKTA (SEQ ID NO: 584). In some embodiments, [A]-[B]-[C]-[D] is or comprises TNNQSSYPAEVVQKTA (SEQ ID NO: 1533), TNNQSKYPAEVVQKTA (SEQ ID NO: 1538), TNNTSLYPAEVVQKTA (SEQ ID NO: 1232), TNNSSSYPAEVVQKTA (SEQ ID NO: 1539), TNNQSRYPAEVVQKTA (SEQ ID NO: 1327), TNNAGAYPAEVVQKTA (SEQ ID NO: 1021), TNNIGSYPAEVVQKTA (SEQ ID NO: 1112), TNNQASYPAEVVQKTA (SEQ ID NO: 1194), TNTASSYPAEVVQKTA (SEQ ID NO: 1575), TNNLGSYPAEVVQKTA (SEQ ID NO: 1027), TNNHSSYPAEVVQKTA (SEQ ID NO: 1310), TNNSSSYPAEVVQKPA (SEQ ID NO: 1142), INNQSSYPAEVVQKTA (SEQ ID NO: 1024), NNNQSRYPAEVVQKTA (SEQ ID NO: 1601), TNSTSLYPAEVVQKTA (SEQ ID NO: 1605), or TNKQASYPAEVVQKTA (SEQ ID NO: 1587); an amino acid sequence comprising any portion of any of the aforesaid amino acid sequences (e.g., any 2, 3, 4, 5, 6, 7, 8, 9, 11, 12, 13, 14, or 15 amino acids, e.g., consecutive amino acids) thereof; an amino acid sequence comprising one, two, or three but no more than four modifications, e.g., substitutions (e.g., conservative substitutions), insertions, or deletions, relative to any of the aforesaid amino acid sequences; or an amino acid sequence comprising one, two, or three but no more than four different amino acids, relative to any one of the aforesaid amino acid sequences. In some embodiments, [C]-[D] is YPAEVVQKTA (SEQ ID NO: 584). In some embodiments, [A]-[B]-[C]-[D] is TNNQSSYPAEVVQKTA (SEQ ID NO: 1533).

[1076] In some embodiments, a peptide described herein comprises an amino acid sequence having the formula [B]-[C], wherein [B] comprises positions X1, X2, and X3, and [C] comprises the amino acid sequence YPAEVVQK (SEQ ID NO: 943). In some embodiments, position X1 of [B] is Q or S. In some embodiments, position X2 of [B] is S, L, or A. In some embodiments, position X3 of [B] is S, Y, or T. In some embodiments, [B] comprises Q at position X1. In some embodiments, [B] comprises S at position X2. In some embodiments, [B] comprises S at position X3. In some embodiments, [B] comprises QS, SL, SA, LY, AT, LS, or SS. In some embodiments, [B] is or comprises QSS, SLY, SAT, or SLS. In some embodiments, [B] is QSS. In some embodiments, [B]-[C] comprises SSYPAEVVQK (SEQ ID NO: 572), LYYPAEVVQK (SEQ ID NO: 702), ATYPAEVVQK (SEQ ID NO: 718), or LSYPAEVVQK (SEQ ID NO: 703). In some embodiments, [B]-[C] is or comprises QSSYPAEVVQK (SEQ ID NO: 150), SLYYPAEVVQK (SEQ ID NO: 639), SATYPAEVVQK (SEQ ID NO: 641), or SLSYPAEVVQK (SEQ ID NO: 642); an amino acid sequence comprising any portion of any of the aforesaid amino acid sequences (e.g., any 2, 3, 4, 5, 6, 7, 8, 9, or 10 amino acids, e.g., consecutive amino acids) thereof; an amino acid sequence comprising one, two, or three but no more than four modifications, e.g., substitutions (e.g., conservative substitutions), insertions, or deletions, relative to any of the aforesaid amino acid sequences; or an amino acid sequence comprising one, two, or three but no more than four different amino acids, relative to any one of the aforesaid amino acid sequences. In some embodiments, [B]-[C] is QSSYPAEVVQK (SEQ ID NO: 150).

[1077] In some embodiments, a peptide comprising the formula [B]-[C], further comprises [A], which comprises positions X_{A}, X_{B}, and X_{C}. In some embodiments, position X_{A} of [A] is T. In some embodiments, position X_{B} of [A] is N. In some embodiments, position X_{C} of [A] is N, T, S, or K. In some embodiments, [A] comprises TN, NS, NT, NK, or NN. In some embodiments, [A] is or comprises TNN, TNS, TNT, or TNK. In some embodiments, the amino acid sequence of [A] is TNN. In some embodiments, [A]-[B] is or comprises TNNQSS (SEQ ID NO: 183), TNSSLY (SEQ ID NO: 648), TNTSAT (SEQ ID NO: 649), TNSSLS (SEQ ID NO: 647), or TNKSAT (SEQ ID NO: 651); an amino acid sequence comprising any portion of any of the aforesaid amino acid sequences (e.g., any 2, 3, 4, or 5 amino acids, e.g., consecutive amino acids) thereof; an amino acid sequence comprising one, two, or three but no more than four modifications, e.g., substitutions (e.g., conservative substitutions), insertions, or deletions, relative to any of the aforesaid amino acid sequences; or an amino acid sequence comprising one, two, or three but no more than four different amino acids, relative to any one of the aforesaid amino acid sequences. In some embodiments, [A]-[B] is TNNQSS (SEQ ID NO: 183). In some embodiments, [A]-[B]-[C] is or comprises TNNQSSYPAEVVQK (SEQ ID NO: 500), TNSSLYYPAEVVQK (SEQ ID NO: 655), TNTSATYPAEVVQK (SEQ ID NO: 656), TNSSLSYPAEVVQK (SEQ ID NO: 657), or TNKSATYPAEVVQK (SEQ ID NO: 663); an amino acid sequence comprising any portion of any of the aforesaid amino acid sequences (e.g., any 2, 3, 4, 5, 6, 7, 8, 9, 10, 11, 12, or 13 amino acids, e.g., consecutive amino acids) thereof; an amino acid sequence comprising one, two, or three but no more than four modifications, e.g., substitutions (e.g., conservative substitutions), insertions, or deletions, relative to any of the aforesaid amino acid sequences; or an amino acid sequence comprising one, two, or three but no more than four different amino acids, relative to any one of the aforesaid amino acid sequences. In some embodiments, [A]-[B] is TNNQSS (SEQ ID NO: 183). In some embodiments, [A]-[B]-[C] is TNNQSSYPAEVVQK (SEQ ID NO: 500).

[1078] In some embodiments, a peptide comprising the formula [B]-[C], further comprises [D], wherein [D] comprises position X4 and X5. In some embodiments, position X4 of [D] is T, N, or P. In some embodiments, position X5 of [D] is A or D. In some embodiments [D] is or comprises TA, TD, NA, or PA. In some embodiments, the amino acid sequence of [D] is TA. In some embodiments, [C]-[D] is or comprises YPAEVVQKTA (SEQ ID NO: 584), YPAEVVQKTD (SEQ ID NO: 719), YPAEVVQKNA (SEQ ID NO: 724), or YPAEVVQKPA (SEQ ID NO: 586); an amino acid sequence comprising any portion of any of the aforesaid amino acid sequences (e.g., any 2, 3, 4, 5, 6, 7, 8, or 9 amino acids, e.g., consecutive amino acids) thereof; an amino acid sequence comprising one, two, or three but no more than four modifications, e.g., substitutions (e.g., conservative substitutions), insertions, or deletions, relative to any of the aforesaid amino acid sequences; or an amino acid sequence comprising one, two, or three but no more than four different amino acids, relative to any one of the aforesaid amino acid sequences. In some embodiments, [C]-[D] is YPAEVVQKTA (SEQ ID NO: 584). In some embodiments, [A]-[B]-[C]-[D] is or comprises TNNQSSYPAEVVQKTA (SEQ ID NO: 1533), TNSSLYYPAEVVQKTA (SEQ ID NO: 2066), TNTSATYPAEVVQKTA (SEQ ID NO: 2067), TNSSLSYPAEVVQKTA (SEQ ID NO: 2068), TNSSLSYPAEVVQKTD (SEQ ID NO: 2070), TNSSLSYPAEVVQKNA (SEQ ID NO: 2072), TNSSLSYPAEVVQKPA (SEQ ID NO: 2073), or TNKSATYPAEVVQKTA (SEQ ID NO: 2075); an amino acid sequence comprising any portion of any of the aforesaid amino acid sequences (e.g., any 2, 3, 4, 5, 6, 7, 8, 9, 11, 12, 13, 14, or 15 amino acids, e.g., consecutive amino acids) thereof; an amino acid sequence comprising one, two, or three but no more than four modifications, e.g., substitutions (e.g., conservative substitutions), insertions, or deletions, relative to any of the aforesaid amino acid sequences; or an amino acid sequence comprising one, two, or three but no more than four different amino acids, relative to any one of the aforesaid amino acid sequences. In some embodiments, [A]-[B]-[C]-[D] is TNNQSSYPAEVVQKTA (SEQ ID NO: 1533).

[1079] In some embodiments, [B] is present immediately subsequent to [A]. In some embodiments, [C] is present immediately subsequent to [B]. In some embodiments, [D] is present immediately subsequent to [C]. In some embodiments, the peptide comprises from N-terminus to C-terminus, [B]-[C]. In some embodiments, the peptide comprises from N-terminus to C-terminus, [B]-[C]. In some embodiments, the peptide comprises from N-terminus to C-terminus, [A]-[B]-[C]. In some embodiments, the peptide comprises from N-terminus to C-terminus, [B]-[C]-[D]. In some embodiments, the peptide comprises from N-terminus to C-terminus, [A]-[B]-[C]-[D].

[1080] In some embodiments, a peptide described herein comprises the formula [K1]-[K2], wherein, [K1] comprises LSY or LYY, and [K2] comprises positions X1, X2, X3, and X4. In some embodiments, [K1] comprises LSY. In some embodiments, position X1 of [K2] is Q, T or P. In some embodiments, position X2 of [K2] is A, in some embodiments, position X3 of [K2] is E or D. In some embodiments, position X4 of [K2] is V or E. In some embodiments, [K2] comprises QA, TA, PA, EV, EE, DV, AE, or AD. In some embodiments, [K2] comprises QAE, TAE, PAE, PAD, AEV, AEE, or ADV. In some embodiments, [K2] is or comprises QAEV (SEQ ID NO: 15), TAEV (SEQ ID NO: 16), PAEV (SEQ ID NO: 17), PAEE (SEQ ID NO: 18), or PADV (SEQ ID NO: 19). In some embodiments, [K1]-[K2] comprises LSYQA (SEQ ID NO: 597), LSYTA (SEQ ID NO: 598), LYYPA (SEQ ID NO: 600), or LSYPA (SEQ ID NO: 603). In some embodiments, [K1]-[K2] comprises LSYQAE (SEQ ID NO: 607), LSYTAE (SEQ ID NO: 610), LYYPAE (SEQ ID NO: 611), LSYPAE (SEQ ID NO: 616), or LSYPAD (SEQ ID NO: 621). In some embodiments, [K1]-[K2] is or comprises LSYQAEV (SEQ ID NO: 667), LSYTAEV (SEQ ID NO: 668), LYYPAEV (SEQ ID NO: 669), LSYPAEV (SEQ ID NO: 671), LSYPAEE (SEQ ID NO: 673), or LSYPADV (SEQ ID NO: 674); an amino acid sequence comprising any portion of any of the aforesaid amino acid sequences (e.g., any 2, 3, 4, 5, or 6 amino acids, e.g., consecutive amino acids) thereof; an amino acid sequence comprising one, two, or three but no more than four modifications, e.g., substitutions (e.g., sequences; or an amino acid sequence comprising one, two, or three but no more than four different amino acids, relative to any one of the aforesaid amino acid sequences.

[1081] In some embodiments, the peptide comprising the amino acid sequence comprising the formula of [K1]-[K2], further comprises [K0], which comprises TNNS (SEQ ID NO: 14). In some embodiments, [K0]-[K1] comprises TNSSLS (SEQ ID NO: 647) or TNSSLY (SEQ ID NO: 648). In some embodiments, [K0]-[K1] is or comprises TNSSLSY (SEQ ID NO: 676) or TNSSLYY (SEQ ID NO: 678); an amino acid sequence comprising any portion of any of the aforesaid amino acid sequences (e.g., any 2, 3, 4, 5, or 6 amino acids, e.g., consecutive amino acids) thereof; an amino acid sequence comprising one, two, or three but no more than four modifications, e.g., substitutions (e.g., conservative substitutions), insertions, or deletions, relative to any of the aforesaid amino acid sequences; or an amino acid sequence comprising one, two, or three but no more than four different amino acids, relative to any one of the aforesaid amino acid sequences. In some embodiments, [K0]-[K1]-[K2] comprises TNSSLSYQA (SEQ ID NO: 679), TNSSLSYTA (SEQ ID NO: 681), TNSSLYYPA (SEQ ID NO: 682), or TNSSLSYPA (SEQ ID NO: 683). In some embodiments, [K0]-[K1]-[K2] comprises TNSSLSYQAE (SEQ ID NO: 684), TNSSLSYTAE (SEQ ID NO: 685), TNSSLYYPAE (SEQ ID NO: 686), TNSSLSYPAE (SEQ ID NO: 687), or TNSSLSYPAD (SEQ ID NO: 689). In some embodiments, [K0]-[K1]-[K2] is or comprises TNSSLSYQAEV (SEQ ID NO: 692), TNSSLSYTAEV (SEQ ID NO: 693), TNSSLYYPAEV (SEQ ID NO: 696), TNSSLSYPAEV (SEQ ID NO: 697), TNSSLSYPAEE (SEQ ID NO: 698), or TNSSLSYPADV (SEQ ID NO: 699); an amino acid sequence comprising any portion of any of the aforesaid amino acid sequences (e.g., any 2, 3, 4, 5, 6, 7, 8, 9, or 10 amino acids, e.g., consecutive amino acids) thereof; an amino acid sequence comprising one, two, or three but no more than four modifications, e.g., substitutions (e.g., conservative substitutions), insertions, or deletions, relative to any of the aforesaid amino acid sequences; or an amino acid sequence comprising one, two, or three but no more than four different amino acids, relative to any one of the aforesaid amino acid sequences.

[1082] In some embodiments, peptide comprising the amino acid sequence comprising the formula of [K1]-[K2], further comprises [K3], wherein [K3] comprises positions X_{A}, X_{B}, and X_{C}. In some embodiments, position X_{A} of [K3] is V. In some embodiments, position X_{B} of [K3] is Q. In some embodiments, position X_{C} of [K3] is K or N. In some embodiments [K3] comprises VQ, QK, or QN. In some embodiments, [K3] is or comprises VQK or VQN. In some embodiments, K2]-[K3] is or comprises QAEVVQK (SEQ ID NO: 52), TAEVVQK (SEQ ID NO: 49), PAEVVQK (SEQ ID NO: 20), PAEEVQK (SEQ ID NO: 51), PAEVVQN (SEQ ID NO: 594), or PADVVQK (SEQ ID NO: 596); an amino acid sequence comprising any portion of any of the aforesaid amino acid sequences (e.g., any 2, 3, 4, 5, or 6 amino acids, e.g., consecutive amino acids) thereof; an amino acid sequence comprising one, two, or three but no more than four modifications, e.g., substitutions (e.g., sequences; or an amino acid sequence comprising one, two, or three but no more than four different amino acids, relative to any one of the aforesaid amino acid sequences. In some embodiments, [K1]-[K2]-[K3] is or comprises LSYQAEVVQK (SEQ ID NO: 700), LSYTAEVVQK (SEQ ID NO: 701), LYYPAEVVQK (SEQ ID NO: 702), LSYPAEVVQK (SEQ ID NO: 703), LSYPAEEVQK (SEQ ID NO: 704), LSYPAEVVQN (SEQ ID NO: 706), or LSYPADVVQK (SEQ ID NO: 708); an amino acid sequence comprising any portion of any of the aforesaid amino acid sequences (e.g., any 2, 3, 4, 5, 6, 7, 8, or 9 amino acids, e.g., consecutive amino acids) thereof; an amino acid sequence comprising one, two, or three but no more than four modifications, e.g., substitutions (e.g., conservative substitutions), insertions, or deletions, relative to any of the aforesaid amino acid sequences; or an amino acid sequence comprising one, two, or three but no more than four different amino acids, relative to any one of the aforesaid amino acid sequences. In some embodiments, [K0]-[K1]-[K2]-[K3] is or comprises TNSSLSYQAEVVQK (SEQ ID NO: 652), TNSSLSYTAEVVQK (SEQ ID NO: 654), TNSSLYYPAEVVQK (SEQ ID NO: 655), TNSSLSYPAEVVQK (SEQ ID NO: 657), TNSSLSYPAEEVQK (SEQ ID NO: 658), TNSSLSYPAEVVQN (SEQ ID NO: 660), or TNSSLSYPADVVQK (SEQ ID NO: 665); an amino acid sequence comprising any portion of any of the aforesaid amino acid sequences (e.g., any 2, 3, 4, 5, 6, 7, 8, 9, 10, 11, 12, or 13 amino acids, e.g., consecutive amino acids) thereof; an amino acid sequence comprising one, two, or three but no more than four modifications, e.g., substitutions (e.g., conservative substitutions), insertions, or deletions, relative to any of the aforesaid amino acid sequences; or an amino acid sequence comprising one, two, or three but no more than four different amino acids, relative to any one of the aforesaid amino acid sequences.

[1083] In some embodiments, the peptide comprising the amino acid sequence comprising the formula of [K1]-[K2], further comprises [K4], wherein [K4] comprises positions X_{D} and X_{E}. In some embodiments, position X_{D} of [K4] is T, P, or N. In some embodiments, position X_{E} of [K4] is A or D. In some embodiments, [K4] is or comprises TA, TD, PA, or NA. In some embodiments, [K3]-[K4] is or comprises VQKTA (SEQ ID NO: 564), VQKTD (SEQ ID NO: 714), VQNTA (SEQ ID NO: 715), VQKNA (SEQ ID NO: 570), or VQKPA (SEQ ID NO: 567); an amino acid sequence comprising any portion of any of the aforesaid amino acid sequences (e.g., any 2, 3, or 4 amino acids, e.g., consecutive amino acids) thereof; an amino acid sequence comprising one, two, or three but no more than four modifications, e.g., substitutions (e.g., conservative substitutions), insertions, or deletions, relative to any of the aforesaid amino acid sequences; or an amino acid sequence comprising one, two, or three but no more than four different amino acids, relative to any one of the aforesaid amino acid sequences. In some embodiments, [N0]-[N1]-[N2]-[N3]-[N4] is or comprises TNSSLSYQAEVVQKTA (SEQ ID NO: 2064), TNSSLSYTAEVVQKTA (SEQ ID NO: 2065), TNSSLYYPAEVVQKTA (SEQ ID NO: 2066), TNSSLSYPAEVVQKTA (SEQ ID NO: 2068), TNSSLSYPAEEVQKTA (SEQ ID NO: 2069), TNSSLSYPAEVVQKTD (SEQ ID NO: 2070), TNSSLSYPAEVVONTA (SEQ ID NO: 2071), TNSSLSYPAEVVQKNA (SEQ ID NO: 2072), TNSSLSYPAEVVQKPA (SEQ ID NO: 2073), or TNSSLSYPADVVQKTA (SEQ ID NO: 2076); an amino acid sequence comprising any portion of any of the aforesaid amino acid sequences (e.g., any 2, 3, 4, 5, 6, 7, 8, 9, 10, 11, 12, 13, 14, or 15 amino acids, e.g., consecutive amino acids) thereof; an amino acid sequence comprising one, two, or three but no more than four modifications, e.g., substitutions (e.g., conservative substitutions), insertions, or deletions, relative to any of the aforesaid amino acid sequences; or an amino acid sequence comprising one, two, or three but no more than four different amino acids, relative to any one of the aforesaid amino acid sequences.

[1084] In some embodiments, [K2] is present immediately subsequent to [K1]. In some embodiments, [K1] is present immediately subsequent to [K0]. In some embodiments, [K3] is present immediately subsequent to [K2]. In some embodiments, [K4] is present immediately subsequent to [K3]. In some embodiments, the peptide comprises from N-terminus to C-terminus, [K1]-[K2]. In some embodiments, the peptide comprises from N-terminus to C-terminus, [K0]-[K1]-[K2]. In some embodiments, the peptide comprises from N-terminus to C-terminus, [K1]-[K2]-[K3]. In some embodiments, the peptide comprises from N-terminus to C-terminus, [K0]-[K1]-[K2]-[K3]. In some embodiments, the peptide comprises from N-terminus to C-terminus, [K1]-[K2]-[K3]-[K4]. In some embodiments, the peptide comprises from N-terminus to C-terminus, [K0]-[K1]-[K2]-[K3]-[K4].

[1085] In some embodiments, a peptide described herein comprises an amino acid sequence comprising at least 3, 4, 5, 6, 7, 8, 9, 10, 11, 12, 13, 14, or 15 consecutive amino acids from any one of the sequences provided in Tables 1, 2A, 2B, 9, and 15-20. In some embodiments, the peptide comprises an amino acid sequence comprising at least 3, 4, 5, 6, 7, 8, 9, 10, 11, 12, 13, 14, or 15 consecutive amino acids from any one of SEQ ID NOs: 943, 1021, 1024, 1027, 1112, 1142, 1214, 1232, 1254, 1300, 1310, 1327, 1331, 1342, 1419, 1453, 1533, 1538, 1539, 1575, 1578, 1583-1587, 1590, 1591-1593, 1598-1608, or 1610-1624. In some embodiments, the peptide comprises an amino acid sequence comprising at least 3, 4, 5, 6, 7, 8, 9, 10, 11, 12, 13, 14, or 15 consecutive amino acids from any one of SEQ ID NOs: 943 or 2064-2080. In some embodiments, the peptide comprises at least 3, 4, 5, 6, or 7 consecutive amino acids from any one of SEQ ID NOs: 943 or 946-966.

[1086] In some embodiments, the 3 consecutive amino acids comprise YPA. In some embodiments, the 4 consecutive amino acids comprise YPAE (SEQ ID NO: 21). In some embodiments, the 5 consecutive amino acids comprise YPAEV (SEQ ID NO: 1). In some embodiments, the 6 consecutive amino acids comprise YPAEVV (SEQ ID NO: 725). In some embodiments, the 7 consecutive amino acids comprise YPAEVVQ (SEQ ID NO: 726). In some embodiments, the amino acid sequence comprises YPAEVVQK (SEQ ID NO: 943). In some embodiments, the amino acid sequence consists of YPAEVVQK (SEQ ID NO: 943).

[1087] In some embodiments, a peptide described herein comprises an amino acid sequence comprising one, two, or three but no more than four modifications, e.g., substitutions (e.g., conservative substitutions), insertions, or deletions, relative to the amino acid sequence of any one of the sequences provided in Tables 1, 2A, 2B, 9, and 15-20. In some embodiments, the peptide comprises an amino acid sequence comprising one, two, or three but no more than four different amino acids, relative to the amino acid sequence of any one of the sequences provided in Tables 1, 2A, 2B, 9, and 15-20. In some embodiments, the peptide comprises an amino acid sequence comprising one, two, or three but no more than four modifications, e.g., substitutions (e.g., conservative substitutions), insertions, or deletions, relative to the amino acid sequence of any one of SEQ ID NOs: 943, 1021, 1024, 1027, 1112, 1142, 1214, 1232, 1254, 1300, 1310, 1327, 1331, 1342, 1419, 1453, 1533, 1538, 1539, 1575, 1578, 1583-1587, 1590, 1591-1593, 1598-1608, or 1610-1624. In some embodiments, the peptide comprises an amino acid sequence comprising one, two, or three but no more than four different amino acids, relative to the amino acid sequence of any one of SEQ ID NOs: 943, 1021, 1024, 1027, 1112, 1142, 1214, 1232, 1254, 1300, 1310, 1327, 1331, 1342, 1419, 1453, 1533, 1538, 1539, 1575, 1578, 1583-1587, 1590, 1591-1593, 1598-1608, or 1610-1624. In some embodiments, the peptide comprises an amino acid sequence comprising one, two, or three but no more than four modifications, e.g., substitutions (e.g., conservative substitutions), insertions, or deletions, relative to the amino acid sequence of any one of SEQ ID NOs: 943 or 2064-2080. In some embodiments, the peptide comprises an amino acid sequence comprising one, two, or three but no more than four different amino acids relative to the amino acid sequence of any one of SEQ ID NOs: 943 or 2064-2080.

[1088] In some embodiments, the peptide comprises an amino acid sequence comprising one, two, or three but no more than four modifications, e.g., substitutions (e.g., conservative substitutions), insertions, or deletions, relative to the amino acid sequence of YPAEVVQK (SEQ ID NO: 943). In some embodiments, the peptide comprises an amino acid sequence comprising one, two, or three but no more than four different amino acids relative to the amino acid sequence of YPAEVVQK (SEQ ID NO: 943).

[1089] In some embodiments, the peptide comprises an amino sequence comprising one, two, or three but no more than four modifications, e.g., substitutions (e.g., conservative substitutions), insertions, or deletions, relative to the amino acid sequence of any one of SEQ ID NOs: 2024-2063. In some embodiments, the peptide comprises an amino acid sequence comprising one, two, or three but no more than four different amino acids, relative to the amino acid sequence of any one of SEQ ID NOs: 2024-2063. In some embodiments, the different amino acids of the amino acid sequence comprising one, two, or three but no more than four different amino acids, relative to the amino acid sequence of any one of SEQ ID NOs: 2024-2063, are present at one or more of the following positions: (i) position 1, wherein the different amino acid is T or L; (ii) position 2, wherein the different amino acid is N, L, K, A, T, or P; (iii) position 3, wherein the different amino acid is N, K, L, A, Y, or S; (iv) position 4, wherein the different amino acid is Q, L, T, S, F, Y, K, or A; (v) position 5, wherein the different amino acid is S, H, A, M, Q, T, V, or F; (vi) position 6, wherein the different amino acid is S, P, V, A, Q, L, T, N, or M; (vii) position 7, wherein the different amino acid is Y, H, S, V, A, L, or T; (viii) position 8, wherein the different amino acid is D, P, A, Q, F, L, S, H, or M; (ix) position 9, wherein the different amino acid is F, A, L, D, or Q; (x) position 10, wherein the different amino acid is T, E, I, or S; (xi) position 11, wherein the different amino acid is V, A, N, or S; (xii) position 12, wherein the different amino acid is V, L, or P; (xiii) position 13, wherein the different amino acid is Q, E, or P; (xiv) position 14, wherein the different amino acid is K, N, S, or L; (xv) position 15, wherein the different amino acid is T, V, M, or L; and/or (xvi) position 16, wherein the different amino acid is A, G, or R.

[1090] In some embodiments, the peptide comprises an amino sequence comprising one, two, or three but no more than four modifications, e.g., substitutions (e.g., conservative substitutions), insertions, or deletions, relative to the amino acid sequence of any one of SEQ ID NOs: 1632-2023. In some embodiments, the peptide comprises an amino acid sequence comprising one, two, or three but no more than four different amino acids, relative to the amino acid sequence of any one of SEQ ID NOs: 1632-2023. In some embodiments, the different amino acids of the amino acid sequence comprising one, two, or three but no more than four different amino acids, relative to the amino acid sequence of any one of SEQ ID NOs: 1623-2023, are present at one or more of the following positions: (i) position 1, wherein the different amino acid is T, G, N, S, E, L, Y, V, or I; (ii) position 2, wherein the different amino acid is D, N, K, E, V, G, R, L, H, F, P, T, A, S, I, or Y; (iii) position 3, wherein the different amino acid is Y, N, K, T, W, Q, M, V, C, A, L, F, H, G, R, S, or P; (iv) position 4, wherein the different amino acid is H, Q, P, E, R, K, A, S, V, L, T, D, I, G, M, or N; (v) position 5, wherein the different amino acid is R, S, K, N, H, G, W, A, P, V, Q, Y, L, or F; (vi) position 6, wherein the different amino acid is G, S, F, R, W, H, I, C, M, A, Y, K, N, Q, V, P, E, D, T, or L; (vii) position 7, wherein the different amino acid is D, Y, S, I, H, F, P, K, R, G, L, Q, A, M, T, N, V, W, C, or E; (viii) position 8, wherein the different amino acid is P, L, Q, T, W, V, G, K, I, Y, N, H, R, D, S, M, A, F, or E; (ix) position 9, wherein the different amino acid is A, R, T, Q, S, M, L, E, K, V, G, D, N, H, F, P, or I; (x) position 10, wherein the different amino acid is K, E, Q, H, V, G, R, S, P, I, N, M, A, L, D, or T; (xi) position 11, wherein the different amino acid is V, A, E, N, R, L, M, T, Q, S, K, C, G, D, Y, P, H, F, or I; (xii) position 12, wherein the different amino acid is V, P, L, S, T, N, A, G, K, R, I, H, E, Q, or M; (xiii) position 13, wherein the different amino acid is Q, K, N, A, H, R, T, V, E, I, P, G, S, or L; (xiv) position 14, wherein the different amino acid is K, E, I, Y, Q, R, G, D, L, N, or S; (xv) position 15, wherein the different amino acid is S, T, N, Q, I, P, E, G, K, M, or H; and/or (xvi) position 16, wherein the different amino acid is A, D, L, Y, Q, or T.

[1091] In some embodiments, the peptide comprises the amino acid sequence of any of the sequences provided in Tables 1, 2A, 2B, 9, and 15-20. In some embodiments, the peptide comprises the amino acid sequence of any of SEQ ID NOs: 943, 1021, 1024, 1027, 1112, 1142, 1214, 1232, 1254, 1300, 1310, 1327, 1331, 1342, 1419, 1453, 1533, 1538, 1539, 1575, 1578, 1583-1587, 1590, 1591-1593, 1598-1608, or 1610-1624. In some embodiments, the peptide comprises the amino acid sequence of any of SEQ ID NOs: 943 or 2064-2080. In some embodiments, the peptide comprises the amino acid sequence of any of SEQ ID NOs: 2024-2063. In some embodiments, the peptide comprises the amino acid sequence of any of SEQ ID NOs: 1632-2023. In some embodiments, the peptide comprises the amino acid sequence of SEQ ID NO: 943.

[1092] In some embodiments, the peptide comprises an amino acid sequence encoded by a nucleotide sequence described herein, e.g., a nucleotide sequence of Table 2A. In some embodiments, the peptide comprises an amino acid sequence encoded by a nucleotide sequence comprising at least one, two, three, four, five, six, or seven modifications, e.g., substitutions, insertions, or deletions, but no more than ten modifications, e.g., substitutions, insertions, or deletions, relative to the nucleotide sequence of SEQ ID NO: 944. In some embodiments, the peptide comprises an amino acid sequence encoded by a nucleotide sequence comprising at least one, two, three, four, five, six, or seven, but no more than ten different nucleotides, relative to the nucleotide sequence of SEQ ID NO: 944. In some embodiments, the peptide comprises an amino acid sequence encoded by the nucleotide sequence of SEQ ID NO: 944, or a nucleotide sequence substantially identical (e.g., having at least 70%, 75%, 80%, 85%, 90%, 92%, 95%, 97%, 98%, or 99% sequence identity) thereto.

[1093] In some embodiments, the nucleotide sequence encoding a peptide described herein comprises a nucleotide sequence described herein, e.g., as described in Table 2A. In some embodiments, the nucleotide sequence encoding a peptide described herein is codon optimized. In some embodiments, the nucleotide sequence encoding a peptide described herein is isolated, e.g., recombinant.

[1094] In some embodiments, the nucleotide sequence encoding a peptide described herein comprises the nucleotide sequence of SEQ ID NO: 944, or a nucleotide sequence comprising at least one, two, three, four, five, six, or seven modifications, e.g., substitutions, insertions, or deletions, but no more than ten modifications, e.g., substitutions, insertions, or deletions, relative to the nucleotide sequence of SEQ ID NO: 944. In some embodiments, the nucleotide sequence encoding a peptide described herein comprises a nucleotide sequence comprising at least one, two, three, four, five, six, or seven, but no more than ten different nucleotides, relative to the nucleotide sequence of SEQ ID NO: 944. In some embodiments the nucleic acid encoding a peptide described herein comprises a nucleotide sequence comprising the nucleotide sequence of SEQ ID NO: 944, or a nucleotide sequence substantially identical (e.g., having at least 70%, 75%, 80%, 85%, 90%, 92%, 95%, 97%, 98%, or 99% sequence identity) thereto.

[1095] In some embodiments, a peptide described herein is fused or coupled, e.g., conjugated, to an active agent. In some embodiments, the active agent is a therapeutic agent. In some embodiments, the active agent comprises a therapeutic protein, an antibody molecule, an enzyme, one or more components of a genome editing system, an Fc polypeptide fused or coupled (e.g., covalently or non covalently) to a therapeutic agent, and/or an RNAi agent (e.g., a dsRNA, antisense oligonucleotide (ASO), siRNA, shRNA, pre-miRNA, pri-miRNA, miRNA, stRNA, lncRNA, piRNA, or snoRNA). In some embodiments, the therapeutic agent is an antibody. In some embodiments, a peptide described herein is fused or coupled, e.g., conjugated (e.g., directly or indirectly) to the Fc region of the antibody, e.g., at the C-terminus of the Fc region or the N-terminus of the Fc region. In some embodiments, the therapeutic agent is an RNAi agent. In some embodiments, the RNAi agent is a siRNA or an ASO. In some embodiments, the ASO or siRNA comprises at least one (e.g., one or more or all) modified nucleotides. In some embodiments, a peptide described herein is fused or coupled, e.g., conjugated (e.g., directly or indirectly via a linker), to at least one strand of the RNAi agent. In some embodiments, a peptide described herein is conjugated, e.g., directly or indirectly via a linker, to the C-terminus of at least one strand of the RNAi agent. In some embodiments, a peptide described herein is conjugated, e.g., directly or indirectly via a linker, to an internal nucleotide of at least one strand of the RNAi agent. In some embodiments, the at least one strand is the sense strand. In some embodiments, the therapeutic agent modulates, e.g., inhibits, decreases, or increases, expression of a CNS related gene, mRNA, and/or protein.

[1096] In some embodiments, the active agent is a diagnostic agent. In some embodiments, the diagnostic agent is or comprises an imaging agent (e.g., a protein or small molecule compound coupled to a detectable moiety). In some embodiments, the imaging agent comprises a PET or MRI ligand, or an antibody molecule coupled to a detectable moiety. In some embodiments, the detectable moiety is or comprises a radiolabel, a fluorophore, a chromophore, or an affinity tag. In some embodiments, the radiolabel is or comprises tc99m, iodine-123, a spin label, iodine-131, indium-111, fluorine-19, carbon-13, nitrogen-15, oxygen-17, gadolinium, manganese, or iron. In some embodiments, the active agent is a small molecule. In some embodiments, the active agent is a ribonucleic acid complex (e.g., a Cas9/gRNA complex), a plasmid, a closed-end DNA, a circ-RNA, or an mRNA.

[1097] In some embodiments, at least 1-5, e.g., at least 1, 2, 3, 4, or 5, peptides are fused or coupled, e.g., conjugated, to an active agent, e.g., a therapeutic agent or a diagnostic agent. In some embodiments, the at least 1-5, e.g., at least 1, 2, 3, 4, or 5, peptides comprise the same amino acid sequence. In some embodiments, the at least 1-5, e.g., at least 1, 2, 3, 4, or 5, peptides comprise different amino acid sequences. In some embodiments, the at least 1-5, e.g., at least 1, 2, 3, 4, or 5, peptides are present in tandem (e.g., connected directly or indirectly via a linker) or in a multimeric configuration. In some embodiments, the peptide comprises an amino acid sequence of at least 3, 4, 5, 6, 7, 8, 9, 10, 11, 12, 15, 20, 25, 30, or 35 amino acids in length.

[1098] In some embodiments, the peptide covalently linked, e.g., directly or indirectly via a linker, to the active agent. In some embodiments, the peptide is conjugated to the active agent via a linker. In some embodiments, the linker is a cleavable linker or a non-cleavable linker. In some embodiments, the cleavable linker is a pH sensitive linker or an enzyme sensitive linker. In some embodiments, the pH sensitive linker comprises a hydrazine/hydrazone linker or a disulfide linker. In some embodiments, the enzyme sensitive linker comprises a peptide based linker, e.g., a peptide linker sensitive to a protease (e.g., a lysosomal protease); or a beta-glucuronide linker. In some embodiments, the non-cleavable linker is a linker comprising a thioether group or a maleimidocaproyl group. In some embodiments, the peptide and the active agent are fused or coupled post-translationally, e.g., using click chemistry. In some embodiments, the peptide and the active agent are fused or couple via chemically induced dimerization. In some embodiments, the peptide is present N-terminal relative to the active agent. In some embodiments, the peptide is present C-terminal relative to the active agent.

[1099] In some embodiments, the peptide is present or coupled to a carrier. In some embodiments, the carrier comprises an exosome, a microvesicle, or a lipid nanoparticle (LNP). In some embodiments, the carrier comprises a therapeutic agent (e.g., an RNAi agent (e.g., an dsRNA, a siRNA, a shRNA, a pre-miRNA, a pri-miRNA, a miRNA, a stRNA, a lncRNA, a piRNA, an antisense oligonucleotide agent (ASO), or a snoRNA), an mRNA, a ribonucleoprotein complex (e.g., a Cas9/gRNA complex), or a circRNA). In some embodiments, the peptide is present on the surface of the carrier. In some embodiments, at least 10%, 20%, 30%, 40%, 50%, 60%, 70%, or 80% of the surface of the carrier comprises at least 1-5, e.g., at least 1, 2, 3, 4, or 5, peptides described herein.

[1100] The present disclosure also provides a nucleic acid or polynucleotide encoding any of the peptides described herein and AAV capsid variants, AAV particles, vectors, and cells comprising the same.

### AAV Capsid Variant

[1101] In some embodiments, an AAV capsid variant described herein (e.g., an AAV5 capsid variant) comprises an amino acid other than T at position 577 (e.g., Y, N, or C), numbered relative to SEQ ID NO: 138. In some embodiments, the AAV capsid variant comprises Y at position 577, numbered relative to SEQ ID NO: 138. In some embodiments, the AAV capsid variant comprises N at position 577, numbered relative to SEQ ID NO: 138. In some embodiments, the AAV capsid variant comprises C at position 577, numbered relative to SEQ ID NO: 138.

[1102] In some embodiments, an AAV capsid variant described herein (e.g., an AAV5 capsid variant) comprises more than one amino acid that replaces the threonine (T) at position 577, numbered relative to SEQ ID NO: 138. In some embodiments, an insert of two, three, four, five, six, seven, eight, nine, or ten amino acids replaces the T at position 577, numbered relative to SEQ ID NO: 138. In some embodiments an insert of eight amino acids replaces the T at position 577, numbered relative to SEQ ID NO: 138.

[1103] In some embodiments, an AAV particle described herein comprises an AAV capsid variant, e.g., an AAV capsid variant described herein (e.g., an AAV capsid variant comprising a peptide or an amino acid sequence described herein). In some embodiments, an AAV capsid variant comprises a peptide as set forth in any of Tables 1, 2A, 2B, 9, or 15-20.

[1104] In some embodiments, an AAV capsid variant described herein comprises an amino acid sequence having the formula [N2]-[N3], wherein [N2] comprises positions X1, X2, X3, X4, and X5 and [N3] comprises the amino acid sequence of VQK, VQN, EQK, VKK, VHK, VQQ, or LQK. In some embodiments, position X1 of [N2] is Y, N, C, or T. In some embodiments, position X2 of [N2] is P, E, K, T, or Q. In some embodiments, position X3 of [N2] is A or P. In some embodiments, position X4 of [N2] is E, S, D, or A. In some embodiments, position X5 of [N2] is V, L, or E. In some embodiments, [N2] comprises Y at position X1. In some embodiments, [N2] comprises P at position X2. In some embodiments, [N2] comprises A at position X3. In some embodiments, [N2] comprises E at position X4. In some embodiments, [N2] comprises V at position X5. In some embodiments, the amino acid sequence of [N3] comprises VQK. In some embodiments, the amino acid sequence of [N3] is VQK.

[1105] In some embodiments, an AAV capsid variant described herein comprises an amino acid sequence having the formula [N2]-[N3], wherein [N2] comprises positions X1, X2, X3, X4, and X5 and [N3] comprises the amino acid sequence of VQK, EQK, VKK, VHK, VQQ, or LQK. In some embodiments [N3] comprises the amino acid sequence of VQK, EQK, or VKK. In some embodiments [N3] comprises the amino acid sequence VQK. In some embodiments, position X1 of [N2] is Y, N, or C. In some embodiments position X1 of [N2] is Y or N. In some embodiments, position X2 of [N2] is P, K, T, or Q. In some embodiments position X2 of [N2] is P, T, or Q. In some embodiments, position X3 of [N2] is A or P. In some embodiments, position X3 of [N2] is A. In some embodiments, position X4 of [N2] is E, S, or A. In some embodiments, position X5 of [N2] is V, L, or E. In some embodiments, position X5 of [N2] is V or L. In some embodiments, [N2] comprises Y at position X1. In some embodiments, [N2] comprises P at position X2. In some embodiments, [N2] comprises A at position X3. In some embodiments, [N2] comprises E at position X4. In some embodiments, [N2] comprises V at position X5. In some embodiments, [N2] comprises YPA, YPP, NKA, YTA, YQA, YTP, NPA, CPA, THA, PAE, PPS, KAE, TAE, QAE, TPS, PAA, HAS, AEV, PSL, AEE, or AAV. In some embodiments, [N2] comprises YPAE (SEQ ID NO: 21), YPPS (SEQ ID NO: 22), NKAE (SEQ ID NO: 23), YTAE (SEQ ID NO: 24), YQAE (SEQ ID NO: 25), YTPS (SEQ ID NO: 26), YPAA (SEQ ID NO: 27), NPAE (SEQ ID NO: 28), CPAE (SEQ ID NO: 29), THAS (SEQ ID NO: 30), PAEV (SEQ ID NO: 17), PPSL (SEQ ID NO: 31), KAEV (SEQ ID NO: 32), TAEV (SEQ ID NO: 16), PAEE (SEQ ID NO: 18), QAEV (SEQ ID NO: 15), TPSL (SEQ ID NO: 33), PAAV (SEQ ID NO: 34), or QAEE (SEQ ID NO: 35). In some embodiments [N2] is or comprises YPAEV (SEQ ID NO: 1), YPPSL (SEQ ID NO: 2), NKAEV (SEQ ID NO: 3), YTAEV (SEQ ID NO: 4), YPAEE (SEQ ID NO: 5), YQAEV (SEQ ID NO: 6), YTPSL (SEQ ID NO: 7), YPAAV (SEQ ID NO: 8), NPAEV (SEQ ID NO: 9), CPAEV (SEQ ID NO: 10), or YQAEE (SEQ ID NO: 11). In some embodiments [N2] is YPAEV (SEQ ID NO: 1). In some embodiments, [N2]-[N3] comprises the amino acid sequence of AEVVQK (SEQ ID NO: 36), PSLVQK (SEQ ID NO: 37), AEVEQK (SEQ ID NO: 38), AEEVQK (SEQ ID NO: 39), PSLEQK (SEQ ID NO: 40), PSLVKK (SEQ ID NO: 41), AEVVKK (SEQ ID NO: 42), AEVVHK (SEQ ID NO: 43), AAVVQK (SEQ ID NO: 44), AEVVQQ (SEQ ID NO: 45), or AEVLQK (SEQ ID NO: 46). In some embodiments [N2]-[N3] comprises the amino acid sequence PAEVVQK (SEQ ID NO: 20), PPSLVQK (SEQ ID NO: 47), KAEVVQK (SEQ ID NO: 48), TAEVVQK (SEQ ID NO: 49), PAEVEQK (SEQ ID NO: 50), PAEEVQK (SEQ ID NO: 51), QAEVVQK (SEQ ID NO: 52), TPSLVQK (SEQ ID NO: 53), PPSLEQK (SEQ ID NO: 54), PPSLVKK (SEQ ID NO: 55), PAEVVKK (SEQ ID NO: 56), PAEVVHK (SEQ ID NO: 57), PAAVVQK (SEQ ID NO: 58), PAEVVQQ (SEQ ID NO: 59), TAEVVKK (SEQ ID NO: 60), PAEVLQK (SEQ ID NO: 61), or QAEEVQK (SEQ ID NO: 62). In some embodiments [N2]-[N3] is or comprises YPAEVVQK (SEQ ID NO: 943), YPPSLVQK (SEQ ID NO: 946), NKAEVVQK (SEQ ID NO: 947), YTAEVVQK (SEQ ID NO: 948), YPAEVEQK (SEQ ID NO: 949), YPAEEVQK (SEQ ID NO: 950), YQAEVVQK (SEQ ID NO: 951), YTPSLVQK (SEQ ID NO: 952), YPPSLEQK (SEQ ID NO: 953), YPPSLVKK (SEQ ID NO: 954), YPAEVVKK (SEQ ID NO: 955), YPAEVVHK (SEQ ID NO: 956), YPAAVVQK (SEQ ID NO: 957), NPAEVVQK (SEQ ID NO: 958), YPAEVVQQ (SEQ ID NO: 959), CPAEVVQK (SEQ ID NO: 960), YTAEVVKK (SEQ ID NO: 961), YPAEVLQK (SEQ ID NO: 962), or YQAEEVQK (SEQ ID NO: 963); an amino acid sequence comprising any portion of any of the aforesaid amino acid sequences (e.g., any 2, 3, 4, 5, 6, or 7 amino acids, e.g., consecutive amino acids) thereof; an amino acid sequence comprising one, two, or three but no more than four modifications, e.g., substitutions (e.g., conservative substitutions), insertions, or deletions, relative to any of the aforesaid amino acid sequences; or an amino acid sequence comprising one, two, or three but no more than four different amino acids, relative to any one of the aforesaid amino acid sequences. In some embodiments [N2]-[N3] is YPAEVVQK (SEQ ID NO: 943).

[1106] In some embodiments, the AAV capsid variant comprising the amino acid sequence comprising the formula of [N2]-[N3], further comprises [N1], which comprises positions X_{D}, X_{E}, and X_{F}. In some embodiments, position X_{D} of [N1] is Q, T, S, A, I, L, or H. In some embodiments, position X_{E} of [N1] is S, G, A, or R. In some embodiments, position X_{F} of [N1] is S, K, L, R, A, or T. In some embodiments, [N1] comprises SK, SL, SS, SR, GA, GS, AS, ST, RS, QS, TS, AG, IG, QA, LG, HS, LS, or QR. In some embodiments, [N1] is or comprises QSS, QSK, TSL, SSS, QSR, AGA, IGS, QAS, ASS, LGS, QST, HSS, LSS, or QRS. In some embodiments, the amino acid sequence of [N1] is QSS. In some embodiments, [N1]-[N2] comprises SSYPA (SEQ ID NO: 63), SKYPA (SEQ ID NO: 64), SLYPA (SEQ ID NO: 65), SRYPA (SEQ ID NO: 66), SSYPP (SEQ ID NO: 67), GAYPA (SEQ ID NO: 68), GSYPA (SEQ ID NO: 69), ASYPA (SEQ ID NO: 70), STNKA (SEQ ID NO: 71), SSYTA (SEQ ID NO: 72), SSYQA (SEQ ID NO: 73), SSYTP (SEQ ID NO: 74), SSNPA (SEQ ID NO: 75), SLCPA (SEQ ID NO: 76), RSYTA (SEQ ID NO: 77), or SSTHA (SEQ ID NO: 78). In some embodiments, [N1]-[N2] comprises SSYPAE (SEQ ID NO: 79), SKYPAE (SEQ ID NO: 80), SLYPAE (SEQ ID NO: 81), SRYPAE (SEQ ID NO: 82), SSYPPS (SEQ ID NO: 83), GAYPAE (SEQ ID NO: 84), GSYPAE (SEQ ID NO: 85), ASYPAE (SEQ ID NO: 86), STNKAE (SEQ ID NO: 87), SSYTAE (SEQ ID NO: 88), SSYQAE (SEQ ID NO: 89), SSYTPS (SEQ ID NO: 90), SSYPAA (SEQ ID NO: 91), SSNPAE (SEQ ID NO: 92), SLCPAE (SEQ ID NO: 93), RSYTAE (SEQ ID NO: 94), SSTHAS (SEQ ID NO: 95). In some embodiments, [N1]-[N2] is or comprises QSSYPAEV (SEQ ID NO: 96), QSKYPAEV (SEQ ID NO: 97), TSLYPAEV (SEQ ID NO: 98), SSSYPAEV (SEQ ID NO: 99), QSRYPAEV (SEQ ID NO: 100), QSSYPPSL (SEQ ID NO: 101), AGAYPAEV (SEQ ID NO: 102), IGSYPAEV (SEQ ID NO: 103), QASYPAEV (SEQ ID NO: 104), ASSYPAEV (SEQ ID NO: 105), LGSYPAEV (SEQ ID NO: 106), QSTNKAEV (SEQ ID NO: 107), HSSYPAEV (SEQ ID NO: 108), SSSYTAEV (SEQ ID NO: 109), TSLYPAEE (SEQ ID NO: 110), ASSYQAEV (SEQ ID NO: 111), QSSYTPSL (SEQ ID NO: 112), QSRYPAEE (SEQ ID NO: 113), LSSYQAEV (SEQ ID NO: 114), HSSYPAAV (SEQ ID NO: 115), QSSNPAEV (SEQ ID NO: 116), QSSYTAEV (SEQ ID NO: 117), TSLCPAEV (SEQ ID NO: 118), QRSYTAEV (SEQ ID NO: 119), or QSSYQAEE (SEQ ID NO: 120); an amino acid sequence comprising any portion of any of the aforesaid amino acid sequences (e.g., any 2, 3, 4, 5, 6, or 7 amino acids, e.g., consecutive amino acids) thereof; an amino acid sequence comprising one, two, or three but no more than four modifications, e.g., substitutions (e.g., conservative substitutions), insertions, or deletions, relative to any of the aforesaid amino acid sequences; or an amino acid sequence comprising one, two, or three but no more than four different amino acids, relative to any one of the aforesaid amino acid sequences. In some embodiments, [N1]-[N2] is QSSYPAEV (SEQ ID NO: 96). In some embodiments, [N1]-[N2]-[N3] comprises SSYPAEVVQ (SEQ ID NO: 121), SKYPAEVVQ (SEQ ID NO: 122), SLYPAEVVQ (SEQ ID NO: 123), SRYPAEVVQ (SEQ ID NO: 124), SSYPPSLVQ (SEQ ID NO: 125), GAYPAEVVQ (SEQ ID NO: 126), GSYPAEVVQ (SEQ ID NO: 127), ASYPAEVVQ (SEQ ID NO: 128), STNKAEVVQ (SEQ ID NO: 129), SSYTAEVVQ (SEQ ID NO: 130), SKYPAEVEQ (SEQ ID NO: 131), SLYPAEEVQ (SEQ ID NO: 132), SSYQAEVVQ (SEQ ID NO: 133), SSYTPSLVQ (SEQ ID NO: 134), SRYPAEEVQ (SEQ ID NO: 135), SSYPPSLEQ (SEQ ID NO: 136), SSYPPSLVK (SEQ ID NO: 140), SSYPAEVVK (SEQ ID NO: 141), SKYPAEVVH (SEQ ID NO: 142), SSYPAAVVQ (SEQ ID NO: 143), SSNPAEVVQ (SEQ ID NO: 144), SLCPAEVVQ (SEQ ID NO: 145), RSYTAEVVQ (SEQ ID NO: 146), SSYTAEVVK (SEQ ID NO: 147), SSYPAEVLQ (SEQ ID NO: 148), or SSYQAEEVQ (SEQ ID NO: 149). In some embodiments, [N1]-[N2]-[N3] is or comprises QSSYPAEVVQK (SEQ ID NO: 150), QSKYPAEVVQK (SEQ ID NO: 151), TSLYPAEVVQK (SEQ ID NO: 152), SSSYPAEVVQK (SEQ ID NO: 153), QSRYPAEVVQK (SEQ ID NO: 154), QSSYPPSLVQK (SEQ ID NO: 155), AGAYPAEVVQK (SEQ ID NO: 156), IGSYPAEVVQK (SEQ ID NO: 157), QASYPAEVVQK (SEQ ID NO: 158), ASSYPAEVVQK (SEQ ID NO: 159), LGSYPAEVVQK (SEQ ID NO: 160), QSTNKAEVVQK (SEQ ID NO: 161), HSSYPAEVVQK (SEQ ID NO: 162), SSSYTAEVVQK (SEQ ID NO: 163), QSKYPAEVEQK (SEQ ID NO: 164), TSLYPAEEVQK (SEQ ID NO: 165), ASSYQAEVVQK (SEQ ID NO: 166), QSSYTPSLVQK (SEQ ID NO: 167), QSRYPAEEVQK (SEQ ID NO: 168), QSSYPPSLEQK (SEQ ID NO: 169), QSSYPPSLVKK (SEQ ID NO: 170), LSSYQAEVVQK (SEQ ID NO: 171), SSSYPAEVVKK (SEQ ID NO: 172), QSKYPAEVVHK (SEQ ID NO: 173), HSSYPAAVVQK (SEQ ID NO: 174), QSSNPAEVVQK (SEQ ID NO: 175), SSSYPAEVVQQ (SEQ ID NO: 176), QSSYTAEVVQK (SEQ ID NO: 177), TSLCPAEVVQK (SEQ ID NO: 178), QRSYTAEVVQK (SEQ ID NO: 179), QSSYTAEVVKK (SEQ ID NO: 180), HSSYPAEVLQK (SEQ ID NO: 181), or QSSYQAEEVQK (SEQ ID NO: 182); an amino acid sequence comprising any portion of any of the aforesaid amino acid sequences (e.g., any 2, 3, 4, 5, 6, 7, 8, 9, or 10 amino acids, e.g., consecutive amino acids) thereof; an amino acid sequence comprising one, two, or three but no more than four modifications, e.g., substitutions (e.g., conservative substitutions), insertions, or deletions, relative to any of the aforesaid amino acid sequences; or an amino acid sequence comprising one, two, or three but no more than four different amino acids, relative to any one of the aforesaid amino acid sequences. In some embodiments, [N1]-[N2]-[N3] is QSSYPAEVVQK (SEQ ID NO: 150).

[1107] In some embodiments, the AAV capsid variant comprising the amino acid sequence comprising the formula [N2]-[N3], further comprises [N0], wherein [N0] comprises positions X_{A}, X_{B}, and X_{C}. In some embodiments, position X_{A} of [N0] is T, I, or N. In some embodiments, positions X_{B} of [N0] is N. In some embodiments, position X_{C} of [N0] is N, T, S, or K. In some embodiments, [N0] comprises TN, IN, NN, NT, NS, or NK. In some embodiments, [N0] is or comprises TNN, TNT, INN, TNS, NNN, or TNK. In some embodiments, [N0] is TNN. In some embodiments, [N0]-[N1] is or comprises TNNQSS (SEQ ID NO: 183), TNNQSK (SEQ ID NO: 184), TNNTSL (SEQ ID NO: 185), TNNSSS (SEQ ID NO: 186), TNNQSR (SEQ ID NO: 187), TNNAGA (SEQ ID NO: 188), TNNIGS (SEQ ID NO: 189), TNNQAS (SEQ ID NO: 190), TNTASS (SEQ ID NO: 191), TNNLGS (SEQ ID NO: 192), TNNQST (SEQ ID NO: 193), TNNHSS (SEQ ID NO: 194), TNNQSK (SEQ ID NO: 184), TNNLSS (SEQ ID NO: 195), INNQSS (SEQ ID NO: 196), TNSQSS (SEQ ID NO: 197), NNNQSR (SEQ ID NO: 198), TNSTSL (SEQ ID NO: 199), TNNQRS (SEQ ID NO: 200), or TNKQAS (SEQ ID NO: 201); an amino acid sequence comprising any portion of any of the aforesaid amino acid sequences (e.g., any 2, 3, 4, or 5 amino acids, e.g., consecutive amino acids) thereof; an amino acid sequence comprising one, two, or three but no more than four modifications, e.g., substitutions (e.g., conservative substitutions), insertions, or deletions, relative to any of the aforesaid amino acid sequences; or an amino acid sequence comprising one, two, or three but no more than four different amino acids, relative to any one of the aforesaid amino acid sequences. In some embodiments, [N0]-[N1] is TNNQSS (SEQ ID NO: 183). In some embodiments, [N0]-[N1]-[N2]-[N3] is or comprises TNNQSSYPAEVVQK (SEQ ID NO: 500), TNNQSKYPAEVVQK (SEQ ID NO: 503), TNNTSLYPAEVVQK (SEQ ID NO: 506), TNNSSSYPAEVVQK (SEQ ID NO: 508), TNNQSRYPAEVVQK (SEQ ID NO: 510), TNNQSSYPPSLVQK (SEQ ID NO: 512), TNNAGAYPAEVVQK (SEQ ID NO: 513), TNNIGSYPAEVVQK (SEQ ID NO: 514), TNNQASYPAEVVQK (SEQ ID NO: 517), TNTASSYPAEVVQK (SEQ ID NO: 520), TNNLGSYPAEVVQK (SEQ ID NO: 523), TNNQSTNKAEVVQK (SEQ ID NO: 524), TNNHSSYPAEVVQK (SEQ ID NO: 525), TNNSSSYTAEVVQK (SEQ ID NO: 526), TNNQSKYPAEVEQK (SEQ ID NO: 529), TNNTSLYPAEEVQK (SEQ ID NO: 530), TNTASSYQAEVVQK (SEQ ID NO: 531), TNNQSSYTPSLVQK (SEQ ID NO: 533), TNNQSRYPAEEVQK (SEQ ID NO: 534), TNNQSSYPPSLEQK (SEQ ID NO: 535), TNNQSSYPPSLVKK (SEQ ID NO: 536), TNNLSSYQAEVVQK (SEQ ID NO: 539), TNNSSSYPAEVVKK (SEQ ID NO: 540), TNNQSKYPAEVVHK (SEQ ID NO: 542), INNQSSYPAEVVQK (SEQ ID NO: 543), TNNHSSYPAAVVQK (SEQ ID NO: 545), TNSQSSNPAEVVQK (SEQ ID NO: 548), TNNSSSYPAEVVQQ (SEQ ID NO: 551), NNNQSRYPAEVVQK (SEQ ID NO: 552), TNNQSSYTAEVVQK (SEQ ID NO: 553), TNNTSLCPAEVVQK (SEQ ID NO: 554), TNSTSLYPAEVVQK (SEQ ID NO: 556), TNNQRSYTAEVVQK (SEQ ID NO: 557), TNNQSSYTAEVVKK (SEQ ID NO: 558), TNNHSSYPAEVLQK (SEQ ID NO: 560), TNNQSSYQAEEVQK (SEQ ID NO: 562) or TNKQASYPAEVVQK (SEQ ID NO: 563); an amino acid sequence comprising any portion of any of the aforesaid amino acid sequences (e.g., any 2, 3, 4, 5, 6, 7, 8, 9, 10, 11, 12, or 13 amino acids, e.g., consecutive amino acids) thereof; an amino acid sequence comprising one, two, or three but no more than four modifications, e.g., substitutions (e.g., conservative substitutions), insertions, or deletions, relative to any of the aforesaid amino acid sequences; or an amino acid sequence comprising one, two, or three but no more than four different amino acids, relative to any one of the aforesaid amino acid sequences. In some embodiments, [N0]-[N1]-[N2]-[N3] is TNNQSSYPAEVVQK (SEQ ID NO: 500).

[1108] In some embodiments, the AAV capsid variant comprising the amino acid sequence comprising the formula [N2]-[N3], further comprises [N4], which comprises positions X_{G} and X_{H}. In some embodiments, position X_{G} of [N4] is T, P, or N. In some embodiments, position X_{H} of [N4] is A. In some embodiments, [N4] is or comprises TA, PA, or NA. In some embodiments, [N4] is TA. In some embodiments, [N3]-[N4] is or comprises VQKTA (SEQ ID NO: 564), EQKTA (SEQ ID NO: 565), VKKTA (SEQ ID NO: 566), VQKPA (SEQ ID NO: 567), VHKTA (SEQ ID NO: 568), VQQTA (SEQ ID NO: 569), VQKNA (SEQ ID NO: 570), or LQKTA (SEQ ID NO: 571); an amino acid sequence comprising any portion of any of the aforesaid amino acid sequences (e.g., any 2, 3, or 4 amino acids, e.g., consecutive amino acids) thereof; an amino acid sequence comprising one, two, or three but no more than four modifications, e.g., substitutions (e.g., conservative substitutions), insertions, or deletions, relative to any of the aforesaid amino acid sequences; or an amino acid sequence comprising one, two, or three but no more than four different amino acids, relative to any one of the aforesaid amino acid sequences. In some embodiments, [N3]-[N4] is VQKTA (SEQ ID NO: 564). In some embodiments, [N0]-[N1]-[N2]-[N3]-[N4] is or comprises

(SEQ ID NO: 1533)
TNNQSSYPAEVVQKTA,
(SEQ ID NO: 1538)
TNNQSKYPAEVVQKTA,
(SEQ ID NO: 1232)
TNNTSLYPAEVVQKTA,
(SEQ ID NO: 1539)
TNNSSSYPAEVVQKTA,
(SEQ ID NO: 1327)
TNNQSRYPAEVVQKTA,
(SEQ ID NO: 1300)
TNNQSSYPPSLVQKTA,
(SEQ ID NO: 1021)
TNNAGAYPAEVVQKTA,
(SEQ ID NO: 1112)
TNNIGSYPAEVVQKTA,
(SEQ ID NO: 1194)
TNNQASYPAEVVQKTA,
(SEQ ID NO: 1575)
TNTASSYPAEVVQKTA,
(SEQ ID NO: 1027)
TNNLGSYPAEVVQKTA,
(SEQ ID NO: 1578)
TNNQSTNKAEVVQKTA,
(SEQ ID NO: 1310)
TNNHSSYPAEVVQKTA,
(SEQ ID NO: 1538)
TNNQSKYPAEVVQKTA,
(SEQ ID NO: 1214)
TNNSSSYTAEVVQKTA,
(SEQ ID NO: 1254)
TNNQSKYPAEVEQKTA,
(SEQ ID NO: 1583)
TNNTSLYPAEEVQKTA,
(SEQ ID NO: 1584)
TNTASSYQAEVVQKTA,
(SEQ ID NO: 1585)
TNNQSSYTPSLVQKTA,
(SEQ ID NO: 1342)
TNNQSRYPAEEVQKTA,
(SEQ ID NO: 1590)
TNNQSSYPPSLEQKTA,
(SEQ ID NO: 1591)
TNNQSSYPPSLVKKTA,
(SEQ ID NO: 1592)
TNNLSSYQAEVVQKTA,
(SEQ ID NO: 1593)
TNNQSSYPPSLVQKPA,
(SEQ ID NO: 1331)
TNNSSSYPAEVVKKTA,
(SEQ ID NO: 1453)
TNNQSKYPAEVVHKTA,
(SEQ ID NO: 1142)
TNNSSSYPAEVVQKPA,
(SEQ ID NO: 1024)
INNQSSYPAEVVQKTA,
(SEQ ID NO: 1598)
TNNHSSYPAAVVQKTA,
(SEQ ID NO: 1599)
TNSQSSNPAEVVQKTA,
(SEQ ID NO: 1419)
TNNSSSYPAEVVQQTA,
(SEQ ID NO: 1601)
NNNQSRYPAEVVQKTA,
(SEQ ID NO: 1602)
TNNQSSYTAEVVQKNA,
(SEQ ID NO: 1603)
TNNTSLCPAEVVQKTA,
(SEQ ID NO: 1605)
TNSTSLYPAEVVQKTA,
(SEQ ID NO: 1604)
TNNQRSYTAEVVQKTA,
(SEQ ID NO: 1606)
TNNQSSYTAEVVKKTA,
(SEQ ID NO: 1607)
TNNHSSYPAEVLQKTA,
(SEQ ID NO: 1608)
TNNQSSYQAEEVQKTA,
or
(SEQ ID NO: 1587)
TNKQASYPAEVVQKTA;

an amino acid sequence comprising any portion of any of the aforesaid amino acid sequences (e.g., any 2, 3, 4, 5, 6, 7, 8, 9, 10, 11, 12, 13, 14, or 15 amino acids, e.g., consecutive amino acids) thereof; an amino acid sequence comprising one, two, or three but no more than four modifications, e.g., substitutions (e.g., conservative substitutions), insertions, or deletions, relative to any of the aforesaid amino acid sequences; or an amino acid sequence comprising one, two, or three but no more than four different amino acids, relative to any one of the aforesaid amino acid sequences. In some embodiments, [N0]-[N1]-[N2]-[N3]-[N4] is TNNQSSYPAEVVQKTA (SEQ ID NO: 1533).

[1109] In some embodiments, the AAV capsid variant described herein comprises the formula [N2]-[N3], wherein [N2] comprises positions X1, X2, X3, X4, and X5 and [N3] comprises the amino acid sequence of VQK or VQN. In some embodiments, [N3] comprises the amino acid sequence VQK. In some embodiments, [N3] is the amino acid sequence VQK. In some embodiments, position X1 of [N2] is Y or T. In some embodiments, position X2 of [N2] is Q, T, P, or E. In some embodiments, position X3 of [N2] is A. In some embodiments, position X4 of [N2] is E or D. In some embodiments, position X4 of [N2] is E or D. In some embodiments, position X5 of [N2] is V or E. In some embodiments, position X2 of [N2] is P, E, K, T, or Q. In some embodiments, position X3 of [N2] is A or P. In some embodiments, position X4 of [N2] is E, S, D, or A. In some embodiments, position X5 of [N2] is V, L, or E. In some embodiments, [N2] comprises Y at position X1. In some embodiments, [N2] comprises P at position X2. In some embodiments, [N2] comprises A at position X3. In some embodiments, [N2] comprises E at position X4. In some embodiments, [N2] comprises V at position X5. In some embodiments, [N2] comprises YP, YQ, YT, TE, QA, TA, PA, EA, EV, EE, DV, AE, or AD. In some embodiments, [N2] comprises YPA, YQA, YTA, TEA, QAE, TAE, PAE, EAE, PAD, AEV, AEE, or ADV. In some embodiments, [N2] comprises YPAE (SEQ ID NO: 21), YQAE (SEQ ID NO: 25), YTAE (SEQ ID NO: 24), TEAE (SEQ ID NO: 587), YPAD (SEQ ID NO: 588), QAEV (SEQ ID NO: 15), TAEV (SEQ ID NO: 16), PAEV (SEQ ID NO: 17), PAEE (SEQ ID NO: 18), EAEV (SEQ ID NO: 590), or PADV (SEQ ID NO: 19). In some embodiments, [N2] is or comprises YPAEV (SEQ ID NO: 1), YQAEV (SEQ ID NO: 6), YTAEV (SEQ ID NO: 4), YPAEE (SEQ ID NO: 5), TEAEV (SEQ ID NO: 12), or YPADV (SEQ ID NO: 13). In some embodiments, [N2] is YPAEV (SEQ ID NO: 1). In some embodiments, [N2]-[N3] comprises AEVVQK (SEQ ID NO: 36), AEEVQK (SEQ ID NO: 39), AEVVQN (SEQ ID NO: 591), or ADVVQK (SEQ ID NO: 593). In some embodiments, [N2]-[N3] comprises PAEVVQN (SEQ ID NO: 594), QAEVVQK (SEQ ID NO: 52), TAEVVQK (SEQ ID NO: 49), PAEVVQK (SEQ ID NO: 20), PAEEVQK (SEQ ID NO: 51), EAEVVQK (SEQ ID NO: 595), or PADVVQK (SEQ ID NO: 596). In some embodiments, [N2]-[N3] is or comprises YPAEVVQK (SEQ ID NO: 943), YQAEVVQK (SEQ ID NO: 951), YTAEVVQK (SEQ ID NO: 948), YPAEEVQK (SEQ ID NO: 950), YPAEVVQN (SEQ ID NO: 964), TEAEVVQK (SEQ ID NO: 965), or YPADVVQK (SEQ ID NO: 966); an amino acid sequence comprising any portion of any of the aforesaid amino acid sequences (e.g., any 2, 3, 4, 5, 6, or 7 amino acids, e.g., consecutive amino acids) thereof; an amino acid sequence comprising one, two, or three but no more than four modifications, e.g., substitutions (e.g., conservative substitutions), insertions, or deletions, relative to any of the aforesaid amino acid sequences; or an amino acid sequence comprising one, two, or three but no more than four different amino acids, relative to any one of the aforesaid amino acid sequences. In some embodiments, [N2]-[N3] is YPAEVVQK (SEQ ID NO: 943).

[1110] In some embodiments, the AAV capsid variant comprising the amino acid sequence comprising the formula of [N2]-[N3], further comprises [N1], which comprises positions X_{D}, X_{E}, and X_{F}. In some embodiments, position X_{D} of [N1] is Q or S. In some embodiments, position X_{E} of [N1] is S, L, A, or T. In some embodiments, position X_{F} of [N1] is S, Y, or T. In some embodiments, [N1] comprises QS, SL, SA, QT, LS, LY, AT, TS, or SS. In some embodiments, [N1] is or comprises QSS, SLS, SLY, SAT, or QTS. In some embodiments, [N1] is QSS. In some embodiments, [N1]-[N2] comprises SSYPA (SEQ ID NO: 63), LSYQA (SEQ ID NO: 597), LSYTA (SEQ ID NO: 598), LYYPA (SEQ ID NO: 600), ATYPA (SEQ ID NO: 601), LSYPA (SEQ ID NO: 603), or TSTEA (SEQ ID NO: 605). In some embodiments, [N1]-[N2] comprises SSYPAE (SEQ ID NO: 79), LSYQAE (SEQ ID NO: 607), LSYTAE (SEQ ID NO: 610), LYYPAE (SEQ ID NO: 611), ATYPAE (SEQ ID NO: 613), LSYPAE (SEQ ID NO: 616), TSTEAE (SEQ ID NO: 619), or LSYPAD (SEQ ID NO: 621). In some embodiments, [N1]-[N2] is or comprises QSSYPAEV (SEQ ID NO: 96), SLSYQAEV (SEQ ID NO: 622), SLSYTAEV (SEQ ID NO: 623), SLYYPAEV (SEQ ID NO: 624), SATYPAEV (SEQ ID NO: 625), SLSYPAEV (SEQ ID NO: 629), SLSYPAEE (SEQ ID NO: 632), QTSTEAEV (SEQ ID NO: 633), or SLSYPADV (SEQ ID NO: 634); an amino acid sequence comprising any portion of any of the aforesaid amino acid sequences (e.g., any 2, 3, 4, 5, 6, or 7 amino acids, e.g., consecutive amino acids) thereof; an amino acid sequence comprising one, two, or three but no more than four modifications, e.g., substitutions (e.g., conservative substitutions), insertions, or deletions, relative to any of the aforesaid amino acid sequences; or an amino acid sequence comprising one, two, or three but no more than four different amino acids, relative to any one of the aforesaid amino acid sequences. In some embodiments, [N1]-[N2] is QSSYPAEV (SEQ ID NO: 96). In some embodiments, [N1]-[N2]-[N3] is or comprises QSSYPAEVVQK (SEQ ID NO: 150), SLSYQAEVVQK (SEQ ID NO: 635), SLSYTAEVVQK (SEQ ID NO: 637), SLYYPAEVVQK (SEQ ID NO: 639), SATYPAEVVQK (SEQ ID NO: 641), SLSYPAEVVQK (SEQ ID NO: 642), SLSYPAEEVQK (SEQ ID NO: 643), SLSYPAEVVQN (SEQ ID NO: 644), QTSTEAEVVQK (SEQ ID NO: 645), or SLSYPADVVQK (SEQ ID NO: 646); an amino acid sequence comprising any portion of any of the aforesaid amino acid sequences (e.g., any 2, 3, 4, 5, 6, 7, 8, 9, or 10 amino acids, e.g., consecutive amino acids) thereof; an amino acid sequence comprising one, two, or three but no more than four modifications, e.g., substitutions (e.g., conservative substitutions), insertions, or deletions, relative to any of the aforesaid amino acid sequences; or an amino acid sequence comprising one, two, or three but no more than four different amino acids, relative to any one of the aforesaid amino acid sequences. In some embodiments, [N1]-[N2]-[N3] is QSSYPAEVVQK (SEQ ID NO: 150).

[1111] In some embodiments, the AAV capsid variant comprising the amino acid sequence comprising the formula [N2]-[N3], further comprises [N0], wherein [N0] comprises positions X_{A}, X_{B}, and X_{C}. In some embodiments, position X_{A} of [N0] is T. In some embodiments, positions X_{B} of [N0] is N. In some embodiments, position X_{C} of [N0] is N, T, S, or K. In some embodiments [N0] comprises TN, NS, NT, NN, or NK. In some embodiments, [N0] is or comprises TNS, TNT, TNN, or TNK. In some embodiments, [N0] is TNN. In some embodiments, [N0]-[N1] is or comprises TNNQSS (SEQ ID NO: 183), TNSSLS (SEQ ID NO: 647), TNSSLY (SEQ ID NO: 648), TNTSAT (SEQ ID NO: 649), TNNQTS (SEQ ID NO: 650), or TNKSAT (SEQ ID NO: 651); an amino acid sequence comprising any portion of any of the aforesaid amino acid sequences (e.g., any 2, 3, 4, or 5 amino acids, e.g., consecutive amino acids) thereof; an amino acid sequence comprising one, two, or three but no more than four modifications, e.g., substitutions (e.g., conservative substitutions), insertions, or deletions, relative to any of the aforesaid amino acid sequences; or an amino acid sequence comprising one, two, or three but no more than four different amino acids, relative to any one of the aforesaid amino acid sequences. In some embodiments, [N0]-[N1] is TNNQSS (SEQ ID NO: 183). In some embodiments, [N0]-[N1]-[N2]-[N3] is or comprises TNNQSSYPAEVVQK (SEQ ID NO: 500), TNSSLSYQAEVVQK (SEQ ID NO: 652), TNSSLSYTAEVVQK (SEQ ID NO: 654), TNSSLYYPAEVVQK (SEQ ID NO: 655), TNTSATYPAEVVQK (SEQ ID NO: 656), TNSSLSYPAEVVQK (SEQ ID NO: 657), TNSSLSYPAEEVQK (SEQ ID NO: 658), TNSSLSYPAEVVQN (SEQ ID NO: 660), TNNQTSTEAEVVQK (SEQ ID NO: 662), TNKSATYPAEVVQK (SEQ ID NO: 663), or TNSSLSYPADVVQK (SEQ ID NO: 665); an amino acid sequence comprising any portion of any of the aforesaid amino acid sequences (e.g., any 2, 3, 4, 5, 6, 7, 8, 9, 10, 11, 12, or 13 amino acids, e.g., consecutive amino acids) thereof; an amino acid sequence comprising one, two, or three but no more than four modifications, e.g., substitutions (e.g., conservative substitutions), insertions, or deletions, relative to any of the aforesaid amino acid sequences; or an amino acid sequence comprising one, two, or three but no more than four different amino acids, relative to any one of the aforesaid amino acid sequences. In some embodiments, [N0]-[N1]-[N2]-[N3] is TNNQSSYPAEVVQK (SEQ ID NO: 500).

[1112] In some embodiments, the AAV capsid variant comprising the amino acid sequence comprising the formula [N2]-[N3], further comprises [N4], which comprises positions X_{G} and X_{H}. In some embodiments, position X_{G} of [N4] is T, P, or N. In some embodiments, position X_{H} of [N4] is A or D. In some embodiments, [N4] is or comprises TA, TD, PA, or NA. In some embodiments, [N4] is TA. In some embodiments, [N3]-[N4] is or comprises VQKTA (SEQ ID NO: 564), EQKTA (SEQ ID NO: 565), VKKTA (SEQ ID NO: 566), VQKPA (SEQ ID NO: 567), VHKTA (SEQ ID NO: 568), VQQTA (SEQ ID NO: 569), VQKNA (SEQ ID NO: 570), or LQKTA (SEQ ID NO: 571); an amino acid sequence comprising any portion of any of the aforesaid amino acid sequences (e.g., any 2, 3, or 4 amino acids, e.g., consecutive amino acids) thereof; an amino acid sequence comprising one, two, or three but no more than four modifications, e.g., substitutions (e.g., conservative substitutions), insertions, or deletions, relative to any of the aforesaid amino acid sequences; or an amino acid sequence comprising at least one, two, or three but no more than four different amino acids, relative to any one of the aforesaid amino acid sequences. In some embodiments, [N3]-[N4] is VQKTA (SEQ ID NO: 564). In some embodiments, [N0]-[N1]-[N2]-[N3]-[N4] is or comprises

(SEQ ID NO: 1533)
TNNQSSYPAEVVQKTA,
(SEQ ID NO: 2064)
TNSSLSYQAEVVQKTA,
(SEQ ID NO: 2065)
TNSSLSYTAEVVQKTA,
(SEQ ID NO: 2066)
TNSSLYYPAEVVQKTA,
(SEQ ID NO: 2067)
TNTSATYPAEVVQKTA,
(SEQ ID NO: 2068)
TNSSLSYPAEVVQKTA,
(SEQ ID NO: 2069)
TNSSLSYPAEEVQKTA,
(SEQ ID NO: 2070)
TNSSLSYPAEVVQKTD,
(SEQ ID NO: 2071)
TNSSLSYPAEVVQNTA,
(SEQ ID NO: 2072)
TNSSLSYPAEVVQKNA,
(SEQ ID NO: 2073)
TNSSLSYPAEVVQKPA,
(SEQ ID NO: 2074)
TNNQTSTEAEVVQKTA,
(SEQ ID NO: 2075)
TNKSATYPAEVVQKTA,
or
(SEQ ID NO: 2076)
TNSSLSYPADVVQKTA;

an amino acid sequence comprising any portion of any of the aforesaid amino acid sequences (e.g., any 2, 3, 4, 5, 6, 7, 8, 9, 10, 11, 12, 13, 14, or 15 amino acids, e.g., consecutive amino acids) thereof; an amino acid sequence comprising one, two, or three but no more than four modifications, e.g., substitutions (e.g., conservative substitutions), insertions, or deletions, relative to any of the aforesaid amino acid sequences; or an amino acid sequence comprising one, two, or three but no more than four different amino acids, relative to any one of the aforesaid amino acid sequences. In some embodiments, [N0]-[N1]-[N2]-[N3]-[N4] is TNNQSSYPAEVVQKT (SEQ ID NO: 737).

[1113] In some embodiments, [N2]-[N3] is present in loop VIII of the AAV capsid variant. In some embodiments [N0], [N1], and/or [N4] are present in loop VIII of the AAV capsid variant. In some embodiments, [N0]-[N1]-[N2]-[N3]-[N4] is present in loop VIII of the AAV capsid variant. In some embodiments, loop VIII comprises positions 571-592 numbered according to SEQ ID NO: 138, or positions 571-599, numbered according to SEQ ID NO: 982.

[1114] In some embodiments, [N0] is present immediately subsequent to position 570, numbered relative to SEQ ID NO: 138. In some embodiments, [N0] replaces positions 571-573 (e.g., T571, N572, and N573), numbered relative to SEQ ID NO: 138. In some embodiments, [N0] is present immediately subsequent to position 570, and [N0] replaces positions 571-573 (e.g., amino acids T571, N572, and N573), numbered relative to SEQ ID NO: 138. In some embodiments, [N1] is present immediately subsequent to position 573, numbered relative to SEQ ID NO: 138. In some embodiments, [N1] replaces positions 574-576 (e.g., Q574, S575, and S576), numbered relative to SEQ ID NO: 138. In some embodiments, [N1] is present immediately subsequent to position 573, and [N1] replaces positions 574-576 (e.g., Q574, S575, and S576), numbered relative to SEQ ID NO: 138. In some embodiments, [N2] is present immediately subsequent to position 576, numbered relative to SEQ ID NO: 138. In some embodiments, [N2] replaces position 577 (e.g., T577), numbered relative to SEQ ID NO: 138. In some embodiments, [N2] is present immediately subsequent to position 576, and [N2] replaces position 577 (e.g., T577), numbered relative to SEQ ID NO: 138. In some embodiments, [N2]-[N3] is present immediately subsequent to position 576, numbered relative to SEQ ID NO: 138. In some embodiments, [N2]-[N3] replaces position 577 (e.g., T577), numbered relative to SEQ ID NO: 138. In some embodiments, [N2]-[N3] is present immediately subsequent to position 576, and [N2]-[N3] replaces position 577 (e.g., T577), numbered relative to SEQ ID NO: 138. In some embodiments, [N2]-[N3]-[N4] is present immediately subsequent to position 576, numbered relative to SEQ ID NO: 138. In some embodiments, [N2]-[N3]-[N4] replaces positions 577-579 (e.g., T577, T578, and A579), numbered relative to SEQ ID NO: 138. In some embodiments, [N2]-[N3]-[N4] is present immediately subsequent to position 576, and [N2]-[N3]-[N4] replaces positions 577-579 (e.g., T577, T578, and A579), numbered relative to SEQ ID NO: 138. In some embodiments, [N1]-[N2]-[N3]-[N4] is present immediately subsequent to position 573, numbered relative to SEQ ID NO: 138. In some embodiments, [N1]-[N2]-[N3]-[N4] replaces positions 574-579 (e.g., Q574, S575, S576, T577, T578, and A579), numbered relative to SEQ ID NO: 138. In some embodiments, [N1]-[N2]-[N3]-[N4] is present immediately subsequent to position 573, and [N1]-[N2]-[N3]-[N4] replaces positions 574-579 (e.g., Q574, S575, S576, T577, T578, and A579), numbered relative to SEQ ID NO: 138. In some embodiments, [N0]-[N1]-[N2]-[N3]-[N4] is present immediately subsequent to position 570. In some embodiments, [N0]-[N1]-[N2]-[N3]-[N4] replaces positions 571-579 (e.g., T571, N572, N573, Q574, S575, S576, T577, T578, and A579), numbered relative to SEQ ID NO: 138. In some embodiments, [N0]-[N1]-[N2]-[N3]-[N4] is present immediately subsequent to position 570, and [N0]-[N1]-[N2]-[N3]-[N4] replaces positions 571-579 (e.g., T571, N572, N573, Q574, S575, S576, T577, T578, and A579), numbered relative to SEQ ID NO: 138. In some embodiments, [N0]-[N1]-[N2]-[N3]-[N4] is present immediately subsequent to position 570, numbered relative to SEQ ID NO: 138, wherein [N2]-[N3] replaces position 577 (e.g., T577), numbered relative to SEQ ID NO: 138.

[1115] In some embodiments, the AAV capsid variant comprises an amino acid other than T at position 577, relative to a reference sequence numbered according to SEQ ID NO: 138. In some embodiments, the AAV capsid variant comprises Y at position 577, relative to a reference sequence numbered according to SEQ ID NO: 138. In some embodiments, X1 of [N2] is present at position 577 (e.g., T577), and positions X2 and X3 of [N2] are present immediately subsequent to position 577, relative to a reference sequence numbered according to SEQ ID NO: 138. In some embodiments, [N3] is present immediately subsequent to [N2].

[1116] In some embodiments, X_{A} of [N0] is present at position 571, X_{B} of [N0] is present at position 572, and X_{C} of [N0] is present at position 573, numbered according to SEQ ID NO: 982. In some embodiments, X_{D} of [N1] is present at position 574, X_{E} of [N1] is present at position 575, and X_{F} of [N1] is present at position 576, numbered according to SEQ ID NO: 982. In some embodiments, X1 of [N2] is present at position 577, X2 of [N2] is present at position 578, X3 of [N2] is present at position 579, X4 of [N2] is present at position 580, and of X5 of [N2] is present at position 581, numbered according to SEQ ID NO: 982. In some embodiments, [N3] is present at positions 582-584, numbered according to SEQ ID NO: 982. In some embodiments, X_{G} of [N4] is present at position 585 and X_{H} of [N4] is present at position 586, numbered according to SEQ ID NO: 982.

[1117] In some embodiments, [N0] is present at positions 571-573, numbered according to SEQ ID NO: 982. In some embodiments, [N1] is present at positions 574-576, numbered according to SEQ ID NO: 982. In some embodiments, [N2] is present at positions 577-581, numbered according to SEQ ID NO: 982. In some embodiments, [N3] is present at positions 582-584, numbered according to SEQ ID NO: 982. In some embodiments, [N4] is present at positions 585-586, numbered according to SEQ ID NO: 982. In some embodiments, [N2]-[N3] is present at positions 577-584, numbered according to SEQ ID NO: 982. In some embodiments, [N0]-[N1]-[N2]-[N3]-[N4] is present at positions 571-586, numbered according to SEQ ID NO: 982.

[1118] In some embodiments, [N1] is present immediately subsequent to [N0]. In some embodiments, [N2] is present immediately subsequent to [N1]. In some embodiments, [N3] is present immediately subsequent to [N2]. In some embodiments, [N4] is present immediately subsequent to [N3].

[1119] In some embodiments, the AAV capsid variant comprises from N-terminus to C-terminus, [N2]-[N3]. In some embodiments, the AAV capsid variant comprises from N-terminus to C-terminus, [N1]-[N2]-[N3]. In some embodiments, the AAV capsid variant comprises from N-terminus to C-terminus, [N1]-[N2]-[N3]-[N4]. In some embodiments, the AAV capsid variant comprises from N-terminus to C-terminus, [N0]-[N1]-[N2]-[N3]. In some embodiments, the AAV capsid variant comprises from N-terminus to C-terminus, [N0]-[N1]-[N2]-[N3]-[N4].

[1120] In some embodiments, [N2]-[N3] is YPAEVVQK (SEQ ID NO: 943), wherein YPAEVVQK (SEQ ID NO: 943) replaces position 577, numbered relative to SEQ ID NO: 138. In some embodiments, [N0]-[N1]-[N2]-[N3]-[N4] is TNNQSSYPAEVVQKTA (SEQ ID NO: 1533) and is present immediately subsequent to position 570, numbered relative to SEQ ID NO: 138, wherein [N2]-[N3] (YPAEVVQK (SEQ ID NO: 943)) replaces position 577 (e.g., replaces T577) numbered relative to SEQ ID NO: 138. In some embodiments, [N2]-[N3] is YPAEVVQK, wherein [N2]-[N3] is present at positions 577-584, numbered according to SEQ ID NO: 982.

[1121] In some embodiments, an AAV capsid variant described herein comprises an amino acid sequence having the formula [B]-[C], wherein [B] comprises positions X1, X2, and X3, and [C] comprises the amino acid sequence YPAEVVQK (SEQ ID NO: 943). In some embodiments, position X1 of [B] is Q, T, S, A, I, L, or H. In some embodiments, position X1 of [B] is Q, T, S, A, or H. In some embodiments, position X2 of [B] is S, G, or A. In some embodiments, position X2 of [B] is S or G. In some embodiments, position X3 of [B] is S, K, L, R, or A. In some embodiments, position X3 of [B] is S, K, L, or R. In some embodiments, [B] comprises Q at position X1. In some embodiments, [B] comprises S at position X2. In some embodiments, [B] comprises S at position X3. In some embodiments, [B] comprises QS, TS, SS, AG, IG, QA, AS, LG, HS, SK, SL, SR, GA, or GS. In some embodiments, [B] is or comprises QSS, TSL, SSS, QSR, QSK, AGA, IGS, QAS, ASS, LGS, or HSS. In some embodiments, [B] is QSS. In some embodiments, [B]-[C] comprises SSYPAEVVQK (SEQ ID NO: 572), SKYPAEVVQK (SEQ ID NO: 573), SLYPAEVVQK (SEQ ID NO: 574), SRYPAEVVQK (SEQ ID NO: 575), GAYPAEVVQK (SEQ ID NO: 576), GSYPAEVVQK (SEQ ID NO: 580), or ASYPAEVVQK (SEQ ID NO: 582). In some embodiments, [B]-[C] is or comprises QSSYPAEVVQK (SEQ ID NO: 150), QSKYPAEVVQK (SEQ ID NO: 151), TSLYPAEVVQK (SEQ ID NO: 152), SSSYPAEVVQK (SEQ ID NO: 153), QSRYPAEVVQK (SEQ ID NO: 154), AGAYPAEVVQK (SEQ ID NO: 156), IGSYPAEVVQK (SEQ ID NO: 157), QASYPAEVVQK (SEQ ID NO: 158), ASSYPAEVVQK (SEQ ID NO: 159), LGSYPAEVVQK (SEQ ID NO: 160), or HSSYPAEVVQK (SEQ ID NO: 162); an amino acid sequence comprising any portion of any of the aforesaid amino acid sequences (e.g., any 2, 3, 4, 5, 6, 7, 8, 9, or 10 amino acids, e.g., consecutive amino acids) thereof; an amino acid sequence comprising one, two, or three but no more than four modifications, e.g., substitutions (e.g., conservative substitutions), insertions, or deletions, relative to any of the aforesaid amino acid sequences; or an amino acid sequence comprising one, two, or three but no more than four different amino acids, relative to any one of the aforesaid amino acid sequences. In some embodiments, [B]-[C] is QSSYPAEVVQK (SEQ ID NO: 150).

[1122] In some embodiments, an AAV capsid variant comprising the formula [B]-[C], further comprises [A], which comprises positions X_{A}, X_{B}, and X_{C}. In some embodiments, position X_{A} of [A] is T, I, or N. In some embodiments, position X_{B} of [A] is N. In some embodiments, position X_{C} of [A] is N, T, S, or K. In some embodiments, [A] comprises TN, IN, NN, NT, NS, or NK. In some embodiments, [A] is or comprises TNN, TNT, INN, NNN, TNS, or TNK. In some embodiments, [A] is TNN. In some embodiments, [A]-[B] is or comprises TNNQSS (SEQ ID NO: 183), TNNQSK (SEQ ID NO: 184), TNNTSL (SEQ ID NO: 185), TNNSSS (SEQ ID NO: 186), TNNQSR (SEQ ID NO: 187), TNNAGA (SEQ ID NO: 188), TNNIGS (SEQ ID NO: 189), TNNQAS (SEQ ID NO: 190), TNTASS (SEQ ID NO: 191), TNNLGS (SEQ ID NO: 192), TNNHSS (SEQ ID NO: 194), INNQSS (SEQ ID NO: 196), NNNQSR (SEQ ID NO: 198), TNSTSL (SEQ ID NO: 199), or TNKQAS (SEQ ID NO: 201); an amino acid sequence comprising any portion of any of the aforesaid amino acid sequences (e.g., any 2, 3, 4, or 5 amino acids, e.g., consecutive amino acids) thereof; an amino acid sequence comprising one, two, or three but no more than four modifications, e.g., substitutions (e.g., conservative substitutions), insertions, or deletions, relative to any of the aforesaid amino acid sequences; or an amino acid sequence comprising one, two, or three but no more than four different amino acids, relative to any one of the aforesaid amino acid sequences. In some embodiments, [A]-[B] is TNNQSS (SEQ ID NO: 183). In some embodiments, [A]-[B]-[C] is or comprises TNNQSSYPAEVVQK (SEQ ID NO: 500), TNNQSKYPAEVVQK (SEQ ID NO: 503), TNNTSLYPAEVVQK (SEQ ID NO: 506), TNNSSSYPAEVVQK (SEQ ID NO: 508), TNNQSRYPAEVVQK (SEQ ID NO: 510), TNNAGAYPAEVVQK (SEQ ID NO: 513), TNNIGSYPAEVVQK (SEQ ID NO: 514), TNNQASYPAEVVQK (SEQ ID NO: 517), TNTASSYPAEVVQK (SEQ ID NO: 520), TNNLGSYPAEVVQK (SEQ ID NO: 523), TNNHSSYPAEVVQK (SEQ ID NO: 525), INNQSSYPAEVVQK (SEQ ID NO: 543), NNNQSRYPAEVVQK (SEQ ID NO: 552), TNSTSLYPAEVVQK (SEQ ID NO: 556), or TNKQASYPAEVVQK (SEQ ID NO: 563); an amino acid sequence comprising any portion of any of the aforesaid amino acid sequences (e.g., any 2, 3, 4, 5, 6, 7, 8, 9, 10, 11, 12, or 13 amino acids, e.g., consecutive amino acids) thereof; an amino acid sequence comprising one, two, or three but no more than four modifications, e.g., substitutions (e.g., conservative substitutions), insertions, or deletions, relative to any of the aforesaid amino acid sequences; or an amino acid sequence comprising one, two, or three but no more than four different amino acids, relative to any one of the aforesaid amino acid sequences. In some embodiments, [A]-[B]-[C] is TNNQSSYPAEVVQK (SEQ ID NO: 500).

[1123] In some embodiments, an AAV capsid variant comprising the formula [B]-[C], further comprises [D], wherein [D] comprises position X4 and X5. In some embodiments, position X4 of [D] is T or N. In some embodiments, position X5 of [D] is A. In some embodiments [D] is or comprises TA or PA. In some embodiments, [D] is TA. In some embodiments, [C]-[D] is or comprises YPAEVVQKTA (SEQ ID NO: 584) or YPAEVVQKPA (SEQ ID NO: 586); an amino acid sequence comprising any portion of any of the aforesaid amino acid sequences (e.g., any 2, 3, 4, 5, 6, 7, 8, or 9 amino acids, e.g., consecutive amino acids) thereof; an amino acid sequence comprising one, two, or three but no more than four modifications, e.g., substitutions (e.g., conservative substitutions), insertions, or deletions, relative to any of the aforesaid amino acid sequences; or an amino acid sequence comprising one, two, or three but no more than four different amino acids, relative to any one of the aforesaid amino acid sequences. In some embodiments, [C]-[D] is YPAEVVQKTA (SEQ ID NO: 584). In some embodiments, [A]-[B]-[C]-[D] is or comprises TNNQSSYPAEVVQKTA (SEQ ID NO: 1533), TNNQSKYPAEVVQKTA (SEQ ID NO: 1538), TNNTSLYPAEVVQKTA (SEQ ID NO: 1232), TNNSSSYPAEVVQKTA (SEQ ID NO: 1539), TNNQSRYPAEVVQKTA (SEQ ID NO: 1327), TNNAGAYPAEVVQKTA (SEQ ID NO: 1021), TNNIGSYPAEVVQKTA (SEQ ID NO: 1112), TNNQASYPAEVVQKTA (SEQ ID NO: 1194), TNTASSYPAEVVQKTA (SEQ ID NO: 1575), TNNLGSYPAEVVQKTA (SEQ ID NO: 1027), TNNHSSYPAEVVQKTA (SEQ ID NO: 1310), TNNSSSYPAEVVQKPA (SEQ ID NO: 1142), INNQSSYPAEVVQKTA (SEQ ID NO: 1024), NNNQSRYPAEVVQKTA (SEQ ID NO: 1601), TNSTSLYPAEVVQKTA (SEQ ID NO: 1605), or TNKQASYPAEVVQKTA (SEQ ID NO: 1587); an amino acid sequence comprising any portion of any of the aforesaid amino acid sequences (e.g., any 2, 3, 4, 5, 6, 7, 8, 9, 11, 12, 13, 14, or 15 amino acids, e.g., consecutive amino acids) thereof; an amino acid sequence comprising one, two, or three but no more than four modifications, e.g., substitutions (e.g., conservative substitutions), insertions, or deletions, relative to any of the aforesaid amino acid sequences; or an amino acid sequence comprising one, two, or three but no more than four different amino acids, relative to any one of the aforesaid amino acid sequences. In some embodiments, [A]-[B]-[C]-[D] is TNNQSSYPAEVVQKTA (SEQ ID NO: 1533).

[1124] In some embodiments, an AAV capsid variant described herein comprises an amino acid sequence having the formula [B]-[C], wherein [B] comprises positions X1, X2, and X3, and [C] comprises the amino acid sequence YPAEVVQK (SEQ ID NO: 943). In some embodiments, position X1 of [B] is Q or S. In some embodiments, position X2 of [B] is S, L, or A. In some embodiments, position X3 of [B] is S, Y, or T. In some embodiments, [B] comprises Q at position X1. In some embodiments, [B] comprises S at position X2. In some embodiments, [B] comprises S at position X3. In some embodiments, [B] comprises QS, SL, SA, LY, AT, LS, or SS. In some embodiments, [B] is or comprises QSS, SLY, SAT, or SLS. In some embodiments, [B] is QSS. In some embodiments, [B]-[C] comprises SSYPAEVVQK (SEQ ID NO: 572), LYYPAEVVQK (SEQ ID NO: 702), ATYPAEVVQK (SEQ ID NO: 718), or LSYPAEVVQK (SEQ ID NO: 703). In some [B]-[C] is or comprises QSSYPAEVVQK (SEQ ID NO: 150), SLYYPAEVVQK (SEQ ID NO: 639), SATYPAEVVQK (SEQ ID NO: 641), or SLSYPAEVVQK (SEQ ID NO: 642); an amino acid sequence comprising any portion of any of the aforesaid amino acid sequences (e.g., any 2, 3, 4, 5, 6, 7, 8, 9, or 10 amino acids, e.g., consecutive amino acids) thereof; an amino acid sequence comprising one, two, or three but no more than four modifications, e.g., substitutions (e.g., conservative substitutions), insertions, or deletions, relative to any of the aforesaid amino acid sequences; or an amino acid sequence comprising one, two, or three but no more than four different amino acids, relative to any one of the aforesaid amino acid sequences. In some [B]-[C] is QSSYPAEVVQK (SEQ ID NO: 150).

[1125] In some embodiments, an AAV capsid variant comprising the formula [B]-[C], further comprises [A], which comprises positions X_{A}, X_{B}, and X_{C}. In some embodiments, position X_{A} of [A] is T. In some embodiments, position X_{B} of [A] is N. In some embodiments, position X_{C} of [A] is N, T, S, or K. In some embodiments, [A] comprises TN, NS, NT, NK, or NN. In some embodiments, [A] is or comprises TNN, TNS, TNT, or TNK. In some embodiments, [A] is TNN. In some embodiments, [A]-[B] is or comprises TNNQSS (SEQ ID NO: 183), TNSSLY (SEQ ID NO: 648), TNTSAT (SEQ ID NO: 649), TNSSLS (SEQ ID NO: 647), or TNKSAT (SEQ ID NO: 651); an amino acid sequence comprising any portion of any of the aforesaid amino acid sequences (e.g., any 2, 3, 4, or 5 amino acids, e.g., consecutive amino acids) thereof; an amino acid sequence comprising one, two, or three but no more than four modifications, e.g., substitutions (e.g., conservative substitutions), insertions, or deletions, relative to any of the aforesaid amino acid sequences; or an amino acid sequence comprising one, two, or three but no more than four different amino acids, relative to any one of the aforesaid amino acid sequences. In some embodiments, [A]-[B] is TNNQSS (SEQ ID NO: 183). In some embodiments, [A]-[B]-[C] is or comprises TNNQSSYPAEVVQK (SEQ ID NO: 500), TNSSLYYPAEVVQK (SEQ ID NO: 655), TNTSATYPAEVVQK (SEQ ID NO: 656), TNSSLSYPAEVVQK (SEQ ID NO: 657), or TNKSATYPAEVVQK (SEQ ID NO: 663); an amino acid sequence comprising any portion of any of the aforesaid amino acid sequences (e.g., any 2, 3, 4, 5, 6, 7, 8, 9, 10, 11, 12, or 13 amino acids, e.g., consecutive amino acids) thereof; an amino acid sequence comprising one, two, or three but no more than four modifications, e.g., substitutions (e.g., conservative substitutions), insertions, or deletions, relative to any of the aforesaid amino acid sequences; or an amino acid sequence comprising one, two, or three but no more than four different amino acids, relative to any one of the aforesaid amino acid sequences. In some embodiments, [A]-[B]-[C] is TNNQSSYPAEVVQK (SEQ ID NO: 500).

[1126] In some embodiments, an AAV capsid variant comprising the formula [B]-[C], further comprises [D], wherein [D] comprises position X4 and X5. In some embodiments, position X4 of [D] is T, N, or P. In some embodiments, position X5 of [D] is A or D. In some embodiments, [D] is or comprises TA, TD, NA, or PA. In some embodiments, [D] is TA. In some embodiments, [C]-[D] is or comprises YPAEVVQKTA (SEQ ID NO: 584), YPAEVVQKTD (SEQ ID NO: 719), YPAEVVQKNA (SEQ ID NO: 724), or YPAEVVQKPA (SEQ ID NO: 586); an amino acid sequence comprising any portion of any of the aforesaid amino acid sequences (e.g., any 2, 3, 4, 5, 6, 7, 8, or 9 amino acids, e.g., consecutive amino acids) thereof; an amino acid sequence comprising one, two, or three but no more than four modifications, e.g., substitutions (e.g., conservative substitutions), insertions, or deletions, relative to any of the aforesaid amino acid sequences; or an amino acid sequence comprising one, two, or three but no more than four different amino acids, relative to any one of the aforesaid amino acid sequences. In some embodiments, [C]-[D] is YPAEVVQKTA (SEQ ID NO: 584). In some embodiments, [A]-[B]-[C]-[D] is or comprises TNNQSSYPAEVVQKTA (SEQ ID NO: 1533), TNSSLYYPAEVVQKTA (SEQ ID NO: 2066), TNTSATYPAEVVQKTA (SEQ ID NO: 2067), TNSSLSYPAEVVQKTA (SEQ ID NO: 2068), TNSSLSYPAEVVQKTD (SEQ ID NO: 2070), TNSSLSYPAEVVQKNA (SEQ ID NO: 2072), TNSSLSYPAEVVQKPA (SEQ ID NO: 2073), or TNKSATYPAEVVQKTA (SEQ ID NO: 2075); an amino acid sequence comprising any portion of any of the aforesaid amino acid sequences (e.g., any 2, 3, 4, 5, 6, 7, 8, 9, 11, 12, 13, 14, or 15 amino acids, e.g., consecutive amino acids) thereof; an amino acid sequence comprising one, two, or three but no more than four modifications, e.g., substitutions (e.g., conservative substitutions), insertions, or deletions, relative to any of the aforesaid amino acid sequences; or an amino acid sequence comprising one, two, or three but no more than four different amino acids, relative to any one of the aforesaid amino acid sequences. In some embodiments, [A]-[B]-[C]-[D] is TNNQSSYPAEVVQKTA (SEQ ID NO: 1533).

[1127] In some embodiments, [B]-[C] is present in loop VIII of the AAV capsid variant. In some embodiments, [A] and/or [D] is present in loop VIII of the AAV capsid variant. In some embodiments, [A]-[B]-[C]-[D] is present in loop VIII of the AAV capsid variant. In some embodiments, loop VIII comprises positions 571-592 numbered according to SEQ ID NO: 138. In some embodiments, loop VIII comprises positions 571-599, numbered according to SEQ ID NO: 982.

[1128] In some embodiments, [A] is present immediately subsequent to position 570, numbered relative to SEQ ID NO: 138. In any of these embodiments, [A] replaces positions 571-573 (e.g., T571, N572, and N573) numbered relative to SEQ ID NO: 138. In some embodiments, [A] is present immediately subsequent to position 570, and [A] replaces positions 571-573 (e.g., T571, N572, and N573) numbered relative to SEQ ID NO: 138. In some embodiments, [B] is present immediately subsequent to position 573, relative to a reference sequence numbered according to SEQ ID NO: 138. In some embodiments, [B] replaces positions 574-576 (e.g., Q574, S575, and S576), relative to a reference sequence numbered according to SEQ ID NO: 138. In some embodiments, [B] is present immediately subsequent to position 573, and [B] replaces positions 574-576 (e.g., Q574, S575, and S576), relative to a reference sequence numbered according to SEQ ID NO: 138. In some embodiments, [C] is present immediately subsequent to position 576, relative to a reference sequence numbered according to SEQ ID NO: 138. In some embodiments, [C] replaces position 577 (e.g., T577), relative to a reference sequence numbered according to SEQ ID NO: 138. In some embodiments, [C] is present immediately subsequent to position 576, wherein [C] replaces position 577 (e.g., T577), relative to a reference sequence numbered according to SEQ ID NO: 138. In some embodiments, [B]-[C] is present immediately subsequent to position 573, relative to a reference sequence numbered according to SEQ ID NO: 138. In some embodiments, [B]-[C] replaces positions 574-577 (e.g., Q574, S575, S576, and T577), relative to a reference sequence numbered according to SEQ ID NO: 138. In some embodiments, [B]-[C] is present immediately subsequent to position 573, and [B]-[C] replaces positions 574-577 (e.g., Q574, S575, S576, and T577), relative to a reference sequence numbered according to SEQ ID NO: 138. In some embodiments, [C]-[D] is present immediately subsequent to position 576, relative to a reference sequence numbered according to SEQ ID NO: 138. In some embodiments, [C]-[D] replaces positions 577-579 (e.g., T577, T578, and A579), relative to a reference sequence numbered according to SEQ ID NO: 138. In some embodiments, [C]-[D] is present immediately subsequent to position 576, and [C]-[D] replaces positions 577-579 (e.g., T577, T578, and A579), relative to a reference sequence numbered according to SEQ ID NO: 138. In some embodiments, [B]-[C]-[D] is present immediately subsequent to position 573, numbered relative to SEQ ID NO: 138. In some embodiments, [B]-[C]-[D] replaces positions 574-579 (e.g., Q574, S575, S576, T577, T578, and A579), numbered relative to SEQ ID NO: 138. In some embodiments [B]-[C]-[D] is present immediately subsequent to position 573, and [B]-[C]-[D] replaces positions 574-579 (e.g., Q574, S575, S576, T577, T578, and A579), numbered relative to SEQ ID NO: 138. In some embodiments [A]-[B]-[C]-[D] is present immediately subsequent to position 570, numbered relative to SEQ ID NO: 138. In some embodiments, [A]-[B]-[C]-[D] replaces positions 571-579 (e.g., T571, N572, N573, Q574, S575, S576, T577, T578, and A579), numbered relative to SEQ ID NO: 138. In some embodiments [A]-[B]-[C]-[D] is present immediately subsequent to position 570, and [A]-[B]-[C]-[D] replaces positions 571-579 (e.g., T571, N572, N573, Q574, S575, S576, T577, T578, and A579), numbered relative to SEQ ID NO: 138.

[1129] In some embodiments, X_{A} of [A] is present at position 571, X_{B} of [A] is present at position 572, and X_{C} of [A] is present at position 573, numbered according to SEQ ID NO: 982. In some embodiments, X1 of [B] is present at position 574, X2 of [B] is present at position 575, and X3 of [B] is present at position 576, numbered according to SEQ ID NO: 982. In some embodiments, [C] is present at positions 577-584, numbered according to SEQ ID NO: 982. In some embodiments, X4 of [D] is present at position 585 and position X5 of [D] is present at position 586, numbered according to SEQ ID NO: 982.

[1130] In some embodiments, [A] is present at positions 571-573, numbered according to SEQ ID NO: 982. In some embodiments, [B] is present at positions 574-576, numbered according to SEQ ID NO: 982. In some embodiments, [C] is present at positions 577-584, numbered according to SEQ ID NO: 982. In some embodiments, [D] is present at positions 585-586, numbered according to SEQ ID NO: 982. In some embodiments, [A]-[B]-[C]-[D] is present at positions 571-586, numbered according to SEQ ID NO: 982.

[1131] In some embodiments, [B] is present immediately subsequent to [A]. In some embodiments, [C] is present immediately subsequent to [B]. In some embodiments, [D] is present immediately subsequent to [C]. In some embodiments, the AAV capsid variant comprises from N-terminus to C-terminus, [B]-[C]. In some embodiments, the AAV capsid variant comprises from N-terminus to C-terminus, [B]-[C]. In some embodiments, the AAV capsid variant comprises from N-terminus to C-terminus, [A]-[B]-[C]. In some embodiments, the AAV capsid variant comprises from N-terminus to C-terminus, [B]-[C]-[D]. In some embodiments, the AAV capsid variant comprises from N-terminus to C-terminus, [A]-[B]-[C]-[D].

[1132] In some embodiments, [C] is YPAEVVQK (SEQ ID NO: 943), wherein YPAEVVQK (SEQ ID NO: 943) replaces position 577 (e.g., T577), numbered relative to SEQ ID NO: 138. In some embodiments, [A]-[B]-[C]-[D] is TNNQSSYPAEVVQKTA (SEQ ID NO: 1533) and is present immediately subsequent to position 570, numbered relative to SEQ ID NO: 138, wherein [C] (YPAEVVQK (SEQ ID NO: 943)) replaces position 577 (e.g., replaces T577) numbered relative to SEQ ID NO: 138. In some embodiments, [C] is YPAEVVQK, wherein [C] is present at positions 577-584, numbered according to SEQ ID NO: 982.

[1133] In some embodiments, an AAV capsid variant described herein comprises the formula [K1]-[K2], wherein, [K1] comprises LSY or LYY, and [K2] comprises positions X1, X2, X3, and X4. In some embodiments, [K1] comprises LSY. In some embodiments, position X1 of [K2] is Q, T or P. In some embodiments, position X2 of [K2] is A, in some embodiments, position X3 of [K2] is E or D. In some embodiments, position X4 of [K2] is V or E. In some embodiments, [K2] comprises QA, TA, PA, EV, EE, DV, AE, or AD. In some embodiments, [K2] comprises QAE, TAE, PAE, PAD, AEV, AEE, or ADV. In some embodiments, [K2] is or comprises QAEV (SEQ ID NO: 15), TAEV (SEQ ID NO: 16), PAEV (SEQ ID NO: 17), PAEE (SEQ ID NO: 18), or PADV (SEQ ID NO: 19). In some embodiments, [K1]-[K2] comprises LSYQA (SEQ ID NO: 597), LSYTA (SEQ ID NO: 598), LYYPA (SEQ ID NO: 600), or LSYPA (SEQ ID NO: 603). In some embodiments, [K1]-[K2] comprises LSYQAE (SEQ ID NO: 607), LSYTAE (SEQ ID NO: 610), LYYPAE (SEQ ID NO: 611), LSYPAE (SEQ ID NO: 616), or LSYPAD (SEQ ID NO: 621). In some embodiments, [K1]-[K2] is or comprises LSYQAEV (SEQ ID NO: 667), LSYTAEV (SEQ ID NO: 668), LYYPAEV (SEQ ID NO: 669), LSYPAEV (SEQ ID NO: 671), LSYPAEE (SEQ ID NO: 673), or LSYPADV (SEQ ID NO: 674); an amino acid sequence comprising any portion of any of the aforesaid amino acid sequences (e.g., any 2, 3, 4, 5, or 6 amino acids, e.g., consecutive amino acids) thereof; an amino acid sequence comprising one, two, or three but no more than four modifications, e.g., substitutions (e.g., conservative substitutions), insertions, or deletions, relative to any of the aforesaid amino acid sequences; or an amino acid sequence comprising one, two, or three but no more than four different amino acids, relative to any one of the aforesaid amino acid sequences.

[1134] In some embodiments, the AAV capsid variant comprising the amino acid sequence comprising the formula of [K1]-[K2], further comprises [K0], which comprises TNNS (SEQ ID NO: 14). In some embodiments, [K0]-[K1] comprises TNSSLS (SEQ ID NO: 647) or TNSSLY (SEQ ID NO: 648). In some embodiments, [K0]-[K1] is or comprises TNSSLSY (SEQ ID NO: 676) or TNSSLYY (SEQ ID NO: 678); an amino acid sequence comprising any portion of any of the aforesaid amino acid sequences (e.g., any 2, 3, 4, 5, or 6 amino acids, e.g., consecutive amino acids) thereof; an amino acid sequence comprising one, two, or three but no more than four modifications, e.g., substitutions (e.g., conservative substitutions), insertions, or deletions, relative to any of the aforesaid amino acid sequences; or an amino acid sequence comprising one, two, or three but no more than four different amino acids, relative to any one of the aforesaid amino acid sequences. In some embodiments, [K0]-[K1]-[K2] comprises TNSSLSYQA (SEQ ID NO: 679), TNSSLSYTA (SEQ ID NO: 681), TNSSLYYPA (SEQ ID NO: 682), or TNSSLSYPA (SEQ ID NO: 683). In some embodiments, [K0]-[K1]-[K2] comprises TNSSLSYQAE (SEQ ID NO: 684), TNSSLSYTAE (SEQ ID NO: 685), TNSSLYYPAE (SEQ ID NO: 686), TNSSLSYPAE (SEQ ID NO: 687), or TNSSLSYPAD (SEQ ID NO: 689). In some embodiments, [K0]-[K1]-[K2] is or comprises TNSSLSYQAEV (SEQ ID NO: 692), TNSSLSYTAEV (SEQ ID NO: 693), TNSSLYYPAEV (SEQ ID NO: 696), TNSSLSYPAEV (SEQ ID NO: 697), TNSSLSYPAEE (SEQ ID NO: 698), or TNSSLSYPADV (SEQ ID NO: 699); an amino acid sequence comprising any portion of any of the aforesaid amino acid sequences (e.g., any 2, 3, 4, 5, 6, 7, 8, 9, or 10 amino acids, e.g., consecutive amino acids) thereof; an amino acid sequence comprising one, two, or three but no more than four modifications, e.g., substitutions (e.g., conservative substitutions), insertions, or deletions, relative to any of the aforesaid amino acid sequences; or an amino acid sequence comprising one, two, or three but no more than four different amino acids, relative to any one of the aforesaid amino acid sequences.

[1135] In some embodiments, AAV capsid variant comprising the amino acid sequence comprising the formula of [K1]-[K2], further comprises [K3], wherein [K3] comprises positions X_{A}, X_{B}, and X_{C}. In some embodiments, position X_{A} of [K3] is V. In some embodiments, position X_{B} of [K3] is Q. In some embodiments, position X_{C} of [K3] is K or N. In some embodiments [K3] comprises VQ, QK, or QN. In some embodiments, [K3] is or comprises VQK or VQN. In some embodiments, K2]-[K3] is or comprises QAEVVQK (SEQ ID NO: 52), TAEVVQK (SEQ ID NO: 49), PAEVVQK (SEQ ID NO: 20), PAEEVQK (SEQ ID NO: 51), PAEVVQN (SEQ ID NO: 594), or PADVVQK (SEQ ID NO: 596); an amino acid sequence comprising any portion of any of the aforesaid amino acid sequences (e.g., any 2, 3, 4, 5, or 6 amino acids, e.g., consecutive amino acids) thereof; an amino acid sequence comprising one, two, or three but no more than four modifications, e.g., substitutions (e.g., conservative substitutions), insertions, or deletions, relative to any of the aforesaid amino acid sequences; or an amino acid sequence comprising one, two, or three but no more than four different amino acids, relative to any one of the aforesaid amino acid sequences. In some embodiments, [K1]-[K2]-[K3] is or comprises LSYQAEVVQK (SEQ ID NO: 700), LSYTAEVVQK (SEQ ID NO: 701), LYYPAEVVQK (SEQ ID NO: 702), LSYPAEVVQK (SEQ ID NO: 703), LSYPAEEVQK (SEQ ID NO: 704), LSYPAEVVQN (SEQ ID NO: 706), or LSYPADVVQK (SEQ ID NO: 708); an amino acid sequence comprising any portion of any of the aforesaid amino acid sequences (e.g., any 2, 3, 4, 5, 6, 7, 8, or 9 amino acids, e.g., consecutive amino acids) thereof; an amino acid sequence comprising one, two, or three but no more than four modifications, e.g., substitutions (e.g., conservative substitutions), insertions, or deletions, relative to any of the aforesaid amino acid sequences; or an amino acid sequence comprising one, two, or three but no more than four different amino acids, relative to any one of the aforesaid amino acid sequences. In some embodiments, [K0]-[K1]-[K2]-[K3] is or comprises TNSSLSYQAEVVQK (SEQ ID NO: 652), TNSSLSYTAEVVQK (SEQ ID NO: 654), TNSSLYYPAEVVQK (SEQ ID NO: 655), TNSSLSYPAEVVQK (SEQ ID NO: 657), TNSSLSYPAEEVQK (SEQ ID NO: 658), TNSSLSYPAEVVQN (SEQ ID NO: 660), or TNSSLSYPADVVQK (SEQ ID NO: 665); an amino acid sequence comprising any portion of any of the aforesaid amino acid sequences (e.g., any 2, 3, 4, 5, 6, 7, 8, 9, 10, 11, 12, or 13 amino acids, e.g., consecutive amino acids) thereof; an amino acid sequence comprising one, two, or three but no more than four modifications, e.g., substitutions (e.g., conservative substitutions), insertions, or deletions, relative to any of the aforesaid amino acid sequences; or an amino acid sequence comprising one, two, or three but no more than four different amino acids, relative to any one of the aforesaid amino acid sequences.

[1136] In some embodiments, the AAV capsid variant comprising the amino acid sequence comprising the formula of [K1]-[K2], further comprises [K4], wherein [K4] comprises positions X_{D} and X_{E}. In some embodiments, position X_{D} of [K4] is T, P, or N. In some embodiments, position X_{E} of [K4] is A or D. In some embodiments, [K4] is or comprises TA, TD, PA, or NA. In some embodiments, [K3]-[K4] is or comprises VQKTA (SEQ ID NO: 564), VQKTD (SEQ ID NO: 714), VQNTA (SEQ ID NO: 715), VQKNA (SEQ ID NO: 570), or VQKPA (SEQ ID NO: 567); an amino acid sequence comprising any portion of any of the aforesaid amino acid sequences (e.g., any 2, 3, or 4 amino acids, e.g., consecutive amino acids) thereof; an amino acid sequence comprising one, two, or three but no more than four modifications, e.g., substitutions (e.g., conservative substitutions), insertions, or deletions, relative to any of the aforesaid amino acid sequences; or an amino acid sequence comprising one, two, or three but no more than four different amino acids, relative to any one of the aforesaid amino acid sequences. In some embodiments, [K0]-[K1]-[K2]-[K3]-[K4] is or comprises TNSSLSYQAEVVQKTA (SEQ ID NO: 2064), TNSSLSYTAEVVQKTA (SEQ ID NO: 2065), TNSSLYYPAEVVQKTA (SEQ ID NO: 2066), TNSSLSYPAEVVQKTA (SEQ ID NO: 2068), TNSSLSYPAEEVQKTA (SEQ ID NO: 2069), TNSSLSYPAEVVQKTD (SEQ ID NO: 2070), TNSSLSYPAEVVQNTA (SEQ ID NO: 2071), TNSSLSYPAEVVQKNA (SEQ ID NO: 2072), TNSSLSYPAEVVQKPA (SEQ ID NO: 2073), or TNSSLSYPADVVQKTA (SEQ ID NO: 2076); an amino acid sequence comprising any portion of any of the aforesaid amino acid sequences (e.g., any 2, 3, 4, 5, 6, 7, 8, 9, 10, 11, 12, 13, 14, or 15 amino acids, e.g., consecutive amino acids) thereof; an amino acid sequence comprising one, two, or three but no more than four modifications, e.g., substitutions (e.g., conservative substitutions), insertions, or deletions, relative to any of the aforesaid amino acid sequences; or an amino acid sequence comprising one, two, or three but no more than four different amino acids, relative to any one of the aforesaid amino acid sequences.

[1137] In some embodiments, [K1]-[K2] is present in loop VIII of the AAV capsid variant. In some embodiments, [K0], [K3], and/or [K4] are present in loop VIII of the AAV capsid variant. In some embodiments, [K0]-[K1]-[K2]-[K3]-[K4] is present in loop VIII of the AAV capsid variant. In some embodiments, loop VIII comprises positions 571-592 numbered according to SEQ ID NO: 138. In some embodiments, loop VIII comprises positions 571-599, numbered according to SEQ ID NO: 982.

[1138] In some embodiments, [K0] is present immediately subsequent to position 570, numbered relative to SEQ ID NO: 138. In some embodiments, [K0] replaces positions 571-574 (e.g., T571, N572, N573, and Q574), numbered relative to SEQ ID NO: 138. In some embodiments, [K] is present immediately subsequent to position 570, and [K0] replaces positions 571-574 (e.g., T571, N572, N573, and Q574), numbered relative to SEQ ID NO: 138. In some embodiments, [K1] is present immediately subsequent to position 574, numbered relative to SEQ ID NO: 138. In some embodiments, [K1] replaces positions 575-577 (e.g., S575, S576, and T577), sequence relative to SEQ ID NO: 138. In some embodiments, [K1] is present immediately subsequent to position 574, wherein [K1] replaces positions 575-577 (e.g., S575, S576, and T577), numbered relative to SEQ ID NO: 138. In some embodiments, [K1]-[K2]-[K3] is present immediately subsequent to position 574, numbered relative to SEQ ID NO: 138. In some embodiments, [K1]-[K2]-[K3] replaces positions 575-577 (e.g., S575, S576, and T577), numbered relative to SEQ ID NO: 138. In some embodiments, [K1]-[K2]-[K3] is present immediately subsequent to position 574, wherein [K1]-[K2]-[K3] replaces positions 575-577 (e.g., S575, S576, and T577), numbered relative to SEQ ID NO: 138. In some embodiments, [K1]-[K2]-[K3]-[K4] is present immediately subsequent to position 574, numbered relative to SEQ ID NO: 138. In some embodiments, [K1]-[K2]-[K3]-[K4] replaces positions 575-579 (e.g., S575, S576, T577, T578, and A579), numbered relative to SEQ ID NO: 138. In some embodiments, [K1]-[K2]-[K3]-[K4] is present immediately subsequent to position 574, wherein [K1]-[K2]-[K3]-[K4] replaces positions 575-579 (e.g., S575, S576, T577, T578, and A579), numbered relative to SEQ ID NO: 138. In some embodiments, [K0]-[K1]-[K2]-[K3]-[K4] is present immediately subsequent to position 570, numbered relative to SEQ ID NO 138. In some embodiments, [K0]-[K1]-[K2]-[K3]-[K4] replaces positions 571-579 (e.g., T571, N572, N573, Q574, S575, S576, T577, T578, and T579), numbered relative to SEQ ID NO 138. In some embodiments, [K0]-[K1]-[K2]-[K3]-[K4] is present immediately subsequent to position 570, and [K0]-[K1]-[K2]-[K3]-[K4] replaces positions 571-579 (e.g., T571, N572, N573, Q574, S575, S576, T577, T578, and T579), numbered relative to SEQ ID NO 138.

[1139] In some embodiments, AAV capsid variant comprises from N-terminus to C-terminus, [K1]-[K2]. In some embodiments, the AAV capsid variant comprises from N-terminus to C-terminus, [K0]-[K1]-[K2]. In some embodiments, the AAV capsid variant comprises from N-terminus to C-terminus, [K1]-[K2]-[K3]. In some embodiments, the AAV capsid variant comprises from N-terminus to C-terminus, [K0]-[K1]-[K2]-[K3]. In some embodiments, the AAV capsid variant comprises from N-terminus to C-terminus, [K1]-[K2]-[K3]-[K4]. In some embodiments, the AAV capsid variant comprises from N-terminus to C-terminus, [K0]-[K1]-[K2]-[K3]-[K4].

[1140] In some embodiments, an AAV capsid variant described herein comprises an amino acid sequence comprising at least 3, 4, 5, 6, 7, 8, 9, 10, 11, 12, 13, 14, or 15 consecutive amino acids from any one of the sequences provided in Tables 1, 2A, 2B, 9, and 15-20. In some embodiments, the AAV capsid variant comprises an amino acid sequence comprising at least 3, 4, 5, 6, 7, 8, 9, 10, 11, 12, 13, 14, or 15 consecutive amino acids from any one of SEQ ID NOs: 943, 1021, 1024, 1027, 1112, 1142, 1214, 1232, 1254, 1300, 1310, 1327, 1331, 1342, 1419, 1453, 1533, 1538, 1539, 1575, 1578, 1583-1587, 1590, 1591-1593, 1598-1608, or 1610-1624. In some embodiments, the AAV capsid variant comprises an amino acid sequence comprising at least 3, 4, 5, 6, 7, 8, 9, 10, 11, 12, 13, 14, or 15 consecutive amino acids from any one of SEQ ID NOs: 943 or 2064-2080. In some embodiments, the AAV capsid variant comprises at least 3, 4, 5, 6, or 7 consecutive amino acids from any one of SEQ ID NOs: 943 or 946-966. In some embodiments, the amino acid sequence is present in loop VIII. In some embodiments, the amino acid sequence is present immediately subsequent to position 570, 571, 572, 573, 574, 575, or 576, relative to a reference sequence numbered according to the amino acid sequence of SEQ ID NO: 138.

[1141] In some embodiments, the 3 consecutive amino acids comprise YPA. In some embodiments, the 4 consecutive amino acids comprise YPAE (SEQ ID NO: 21). In some embodiments, the 5 consecutive amino acids comprise YPAEV (SEQ ID NO: 1). In some embodiments, the 6 consecutive amino acids comprise YPAEVV (SEQ ID NO: 725). In some embodiments, the 7 consecutive amino acids comprise YPAEVVQ (SEQ ID NO: 726). In some embodiments, the amino acid sequence comprises YPAEVVQK (SEQ ID NO: 943). In some embodiments, the amino acid sequence consists of YPAEVVQK (SEQ ID NO: 943).

[1142] In In some embodiments, an AAV capsid variant described herein comprises an amino acid sequence comprising one, two, or three but no more than four modifications, e.g., substitutions (e.g., conservative substitutions), insertions, or deletions, relative to the amino acid sequence of any one of the sequences provided in Tables 1, 2A, 2B, 9, and 15-20. In some embodiments, the AAV capsid variant comprises an amino acid sequence comprising one, two, or three but no more than four different amino acids, relative to the amino acid sequence of any one of the sequences provided in Tables 1, 2A, 2B, 9, and 15-20. In some embodiments, the AAV capsid variant comprises an amino acid sequence comprising one, two, or three but no more than four modifications, e.g., substitutions (e.g., conservative substitutions), insertions, or deletions, relative to the amino acid sequence of any one of SEQ ID NOs: 943, 1021, 1024, 1027, 1112, 1142, 1214, 1232, 1254, 1300, 1310, 1327, 1331, 1342, 1419, 1453, 1533, 1538, 1539, 1575, 1578, 1583-1587, 1590, 1591-1593, 1598-1608, or 1610-1624. In some embodiments, the AAV capsid variant comprises an amino acid sequence comprising one, two, or three but no more than four different amino acids, relative to the amino acid sequence of any one of SEQ ID NOs: 943, 1021, 1024, 1027, 1112, 1142, 1214, 1232, 1254, 1300, 1310, 1327, 1331, 1342, 1419, 1453, 1533, 1538, 1539, 1575, 1578, 1583-1587, 1590, 1591-1593, 1598-1608, or 1610-1624. In some embodiments, the AAV capsid variant comprises an amino acid sequence comprising one, two, or three but no more than four modifications, e.g., substitutions (e.g., conservative substitutions), insertions, or deletions, relative to the amino acid sequence of any one of SEQ ID NOs: 943 or 2064-2080. In some embodiments, the AAV capsid variant comprises an amino acid sequence comprising one, two, or three but no more than four different amino acids relative to the amino acid sequence of any one of SEQ ID NOs: 943 or 2064-2080. In some embodiments, the amino acid sequence is present in loop VIII. In some embodiments, loop VIII comprises positions 571-592 numbered according to SEQ ID NO: 138. In some embodiments, loop VIII comprises positions 571-599, numbered according to SEQ ID NO: 982. In some embodiments, the amino acid sequence is present immediately subsequent to position 570, 571, 572, 573, 574, 575, or 576, relative to a reference sequence numbered according to the amino acid sequence of SEQ ID NO: 138. In some embodiments, the amino acid sequence replaces position 577 (e.g., T577), relative to a reference sequence numbered according to the amino acid sequence of SEQ ID NO: 138.

[1143] In some embodiments, the AAV capsid variant comprises an amino acid sequence comprising one, two, or three but no more than four modifications, e.g., substitutions (e.g., conservative substitutions), insertions, or deletions, relative to the amino acid sequence of YPAEVVQK (SEQ ID NO: 943). In some embodiments, the AAV capsid variant comprises an amino acid sequence comprising one, two, or three, but no more than four different amino acids that relative to the amino acid sequence of YPAEVVQK (SEQ ID NO: 943).

[1144] In some embodiments, the AAV capsid variant comprises an amino sequence comprising one, two, or three but no more than four modifications, e.g., substitutions (e.g., conservative substitutions), insertions, or deletions, relative to the amino acid sequence of any one of SEQ ID NOs: 2024-2063. In some embodiments, the AAV capsid variant comprises an amino acid sequence comprising one, two, or three but no more than four different amino acids, relative to the amino acid sequence of any one of SEQ ID NOs: 2024-2063. In some embodiments, the different amino acids of the amino acid sequence comprising one, two, or three but no more than four different amino acids, relative to the amino acid sequence of any one of SEQ ID NOs: 2024-2063, are present at one or more of the following positions: (i) position 1, wherein the different amino acid is T or L; (ii) position 2, wherein the different amino acid is N, L, K, A, T, or P; (iii) position 3, wherein the different amino acid N, K, L, A, Y, or S; (iv) position 4, wherein the different amino acid is Q, L, T, S, F, Y, K, or A; (v) position 5, wherein the different amino acid is S, H, A, M, Q, T, V, or F; (vi) position 6, wherein the different amino acid is S, P, V, A, Q, L, T, N, or M; (vii) position 7, wherein the different amino acid is Y, H, S, V, A, L, or T; (viii) position 8, wherein the different amino acid is D, P, A, Q, F, L, S, H, or M; (ix) position 9, wherein the different amino acid is F, A, L, D, or Q; (x) position 10, wherein the different amino acid is T, E, I, or S; (xi) position 11, wherein the different amino acid is V, A, N, or S; (xii) position 12, wherein the different amino acid is V, L, or P; (xiii) position 13, wherein the different amino acid is Q, E, or P; (xiv) position 14, wherein the different amino acid is K, N, S, or L; (xv) position 15, wherein the different amino acid is T, V, M, or L; and/or (xvi) position 16, wherein the different amino acid is A, G, or R. In some embodiments, the amino acid sequence is present in loop VIII. In some embodiments, the amino acid sequence is present immediately subsequent to position 570, 571, 572, 573, 574, 575, or 576, relative to a reference sequence numbered according to the amino acid sequence of SEQ ID NO: 138.

[1145] In some embodiments, the AAV capsid variant comprises an amino sequence comprising one, two, or three but no more than four modifications, e.g., substitutions (e.g., conservative substitutions), insertions, or deletions, relative to the amino acid sequence of any one of SEQ ID NOs: 1632-2023. In some embodiments, the AAV capsid variant comprises an amino acid sequence comprising one, two, or three but no more than four different amino acids, relative to the amino acid sequence of any one of SEQ ID NOs: 1632-2023. In some embodiments, the different amino acids of the amino acid sequence comprising one, two, or three but no more than four different amino acids, relative to the amino acid sequence of any one of SEQ ID NOs: 1623-2023, are present at one or more of the following positions: (i) position 1, wherein the different amino acid is T, G, N, S, E, L, Y, V, or I; (ii) position 2, wherein the different amino acid is D, N, K, E, V, G, R, L, H, F, P, T, A, S, I, or Y; (iii) position 3, wherein the different amino acid is Y, N, K, T, W, Q, M, V, C, A, L, F, H, G, R, S, or P; (iv) position 4, wherein the different amino acid is H, Q, P, E, R, K, A, S, V, L, T, D, I, G, M, or N; (v) position 5, wherein the different amino acid is R, S, K, N, H, G, W, A, P, V, Q, Y, L, or F; (vi) position 6, wherein the different amino acid is G, S, F, R, W, H, I, C, M, A, Y, K, N, Q, V, P, E, D, T, or L; (vii) position 7, wherein the different amino acid is D, Y, S, I, H, F, P, K, R, G, L, Q, A, M, T, N, V, W, C, or E; (viii) position 8, wherein the different amino acid is P, L, Q, T, W, V, G, K, I, Y, N, H, R, D, S, M, A, F, or E; (ix) position 9, wherein the different amino acid is A, R, T, Q, S, M, L, E, K, V, G, D, N, H, F, P, or I; (x) position 10, wherein the different amino acid is K, E, Q, H, V, G, R, S, P, I, N, M, A, L, D, or T; (xi) position 11, wherein the different amino acid is V, A, E, N, R, L, M, T, Q, S, K, C, G, D, Y, P, H, F, or I; (xii) position 12, wherein the different amino acid is V, P, L, S, T, N, A, G, K, R, I, H, E, Q, or M; (xiii) position 13, wherein the different amino acid is Q, K, N, A, H, R, T, V, E, I, P, G, S, or L; (xiv) position 14, wherein the different amino acid is K, E, I, Y, Q, R, G, D, L, N, or S; (xv) position 15, wherein the different amino acid is S, T, N, Q, I, P, E, G, K, M, or H; and/or (xvi) position 16, wherein the different amino acid is A, D, L, Y, Q, or T. In some embodiments, the amino acid sequence is present in loop VIII. In some embodiments, the amino acid sequence is present immediately subsequent to position 570, 571, 572, 573, 574, 575, or 576, relative to a reference sequence numbered according to the amino acid sequence of SEQ ID NO: 138.

[1146] In some embodiments, the AAV capsid variant comprises the amino acid sequence of any of the sequences provided in Tables 1, 2A, 2B, 9, and 15-20. In some embodiments, the AAV capsid variant comprises the amino acid sequence of any of SEQ ID NOs: 943, 1021, 1024, 1027, 1112, 1142, 1214, 1232, 1254, 1300, 1310, 1327, 1331, 1342, 1419, 1453, 1533, 1538, 1539, 1575, 1578, 1583-1587, 1590, 1591-1593, 1598-1608, or 1610-1624. In some embodiments, the AAV capsid variant comprises the amino acid sequence of any of SEQ ID NOs: 943 or 2064-2080. In some embodiments, the AAV capsid variant comprises the amino acid sequence of any of SEQ ID NOs: 2024-2063. In some embodiments, the AAV capsid variant comprises the amino acid sequence of any of SEQ ID NOs: 1632-2023. In some embodiments, the AAV capsid variant comprises the amino acid sequence of SEQ ID NO: 943. In some embodiments, the amino acid sequence is present in loop VIII. In some embodiments, the amino acid sequence is present immediately subsequent to position 570, relative to a reference sequence numbered according to the amino acid sequence of SEQ ID NO: 138. In some embodiments, the amino acid sequence replaces positions 571-579 (e.g., T571, N572, N573, Q574, S575, S576, T577, T578, and T579), relative to a reference sequence numbered according to SEQ ID NO 138. In some embodiments, the amino acid sequence is present immediately subsequent to position 570, and the amino acid sequence replaces positions 571-579 (e.g., T571, N572, N573, Q574, S575, S576, T577, T578, and T579), relative to a reference sequence numbered according to SEQ ID NO 138. In some embodiments, the amino acid sequence is present immediately subsequent to position 571, relative to a reference sequence numbered according to the amino acid sequence of SEQ ID NO: 138. In some embodiments, the amino acid sequence replaces positions 572-579 (e.g., N572, N573, Q574, S575, S576, T577, T578, and T579), relative to a reference sequence numbered according to SEQ ID NO 138. In some embodiments, the amino acid sequence is present immediately subsequent to position 571, and the amino acid sequence replaces positions 572-579 (e.g., N572, N573, Q574, S575, S576, T577, T578, and T579), relative to a reference sequence numbered according to SEQ ID NO 138. In some embodiments, the amino acid sequence is present immediately subsequent to position 572, relative to a reference sequence numbered according to the amino acid sequence of SEQ ID NO: 138. In some embodiments, the amino acid sequence replaces positions 573-579 (e.g., N573, Q574, S575, S576, T577, T578, and T579), relative to a reference sequence numbered according to SEQ ID NO 138. In some embodiments, the amino acid sequence is present immediately subsequent to position 572, and the amino acid sequence replaces positions 573-579 (e.g., N573, Q574, S575, S576, T577, T578, and T579), relative to a reference sequence numbered according to SEQ ID NO 138. In some embodiments, the amino acid sequence is present immediately subsequent to position 573, relative to a reference sequence numbered according to the amino acid sequence of SEQ ID NO: 138. In some embodiments, the amino acid sequence replaces positions 574-579 (e.g., Q574, S575, S576, T577, T578, and T579), relative to a reference sequence numbered according to SEQ ID NO 138. In some embodiments, the amino acid sequence is present immediately subsequent to position 573, and the amino acid sequence replaces positions 574-579 (e.g., Q574, S575, S576, T577, T578, and T579), relative to a reference sequence numbered according to SEQ ID NO 138. In some embodiments, the amino acid sequence is present immediately subsequent to position 574, relative to a reference sequence numbered according to the amino acid sequence of SEQ ID NO: 138. In some embodiments, the amino acid sequence replaces positions 575-579 (e.g., S575, S576, T577, T578, and T579), relative to a reference sequence numbered according to SEQ ID NO 138. In some embodiments, the amino acid sequence is present immediately subsequent to position 574, and the amino acid sequence replaces positions 575-579 (e.g., S575, S576, T577, T578, and T579), relative to a reference sequence numbered according to SEQ ID NO 138. In some embodiments, the amino acid sequence is present immediately subsequent to position 575, relative to a reference sequence numbered according to the amino acid sequence of SEQ ID NO: 138. In some embodiments, the amino acid sequence replaces positions 576-579 (e.g., S576, T577, T578, and T579), relative to a reference sequence numbered according to SEQ ID NO 138. In some embodiments, the amino acid sequence is present immediately subsequent to position 575, and the amino acid sequence replaces positions 576-579 (e.g., S575, S576, T577, T578, and T579), relative to a reference sequence numbered according to SEQ ID NO 138. In some embodiments, the amino acid sequence is present immediately subsequent to position 576, relative to a reference sequence numbered according to the amino acid sequence of SEQ ID NO: 138. In some embodiments, the amino acid sequence replaces position 577 (e.g., T577), numbered relative to SEQ ID NO: 138. In some embodiments, the amino acid sequence replaces positions 577-579 (e.g., T577, T578, and T579), relative to a reference sequence numbered according to SEQ ID NO 138. In some embodiments, the amino acid sequence is present immediately subsequent to position 576, and the amino acid sequence replaces position 577 (e.g., T577), relative to a reference sequence numbered according to SEQ ID NO 138. In some embodiments, the amino acid sequence is present immediately subsequent to position 576, and the amino acid sequence replaces positions 577-579 (e.g., T577, T578, and T579), relative to a reference sequence numbered according to SEQ ID NO 138.

[1147] In some embodiments, the AAV capsid variant comprises the amino acid sequence of any of SEQ ID NOs: 943 or 946-966, wherein the amino acid sequence replaces position 577 (e.g., T577), numbered relative to SEQ ID NO: 138. In some embodiments, the AAV capsid variant comprises the amino acid sequence of any of SEQ ID NOs: 943 or 946-966, wherein the amino acid sequence is present immediately subsequent to position 576, numbered relative to SEQ ID NO: 138. In some embodiments, the AAV capsid variant comprises the amino acid sequence of any of SEQ ID NOs: 943 or 946-966, wherein the amino acid sequence is present immediately subsequent to position 576, and wherein the amino acid sequence replaces position 577 (e.g., T577), numbered relative to SEQ ID NO: 138.

[1148] In some embodiments, the AAV capsid variant (e.g., an AAV capsid variant described herein), comprises an amino acid sequence encoded by the nucleotide sequence of SEQ ID NO: 944, or a nucleotide sequence substantially identical (e.g., having at least 70%, 75%, 80%, 85%, 90%, 92%, 95%, 97%, 98%, or 99% sequence identity) thereto. In some embodiments, the AAV capsid variant described herein, comprises an amino acid sequence encoded by the nucleotide sequence of SEQ ID NO: 944, or a nucleotide sequence comprising at least one, two, three, four, five, six, or seven modifications, e.g., substitutions, insertions, or deletions, but no more than ten modifications, e.g., substitutions, insertions, or deletions, relative to the nucleotide sequence of SEQ ID NO: 944. In some embodiments, the AAV capsid variant comprises an amino acid sequence encoded by a nucleotide sequence comprising at least one, two, three, four, five, six, or seven, but no more than ten different nucleotides relative to the nucleotide sequence of SEQ ID NO: 944.

[1149] In some embodiments, the nucleotide sequence encoding the AAV capsid variant (e.g., an AAV capsid variant described herein), comprises the nucleotide sequence of SEQ ID NO: 944, or a nucleotide sequence substantially identical (e.g., having at least 70%, 75%, 80%, 85%, 90%, 92%, 95%, 97%, 98%, or 99% sequence identity) thereto. In some embodiments, the nucleic acid sequence encoding the AAV capsid variant comprises a nucleotide sequence comprising at least one, two, three, four, five, six, or seven modifications, e.g., substitutions, insertions, or deletions, but no more than ten modifications, e.g., substitutions, insertions, or deletions, relative to the nucleotide sequences of SEQ ID NO: 944. In some embodiments, the nucleotide sequence encoding an AAV capsid variant described herein comprises a nucleotide sequence comprising at least one, two, three, four, five, six, or seven, but no more than ten different nucleotides relative to the nucleotide sequence of SEQ ID NO: 944.

[1150] In some embodiments, an AAV capsid variant described herein comprises the amino acid sequence of YPAEVVQK (SEQ ID NO: 943), wherein the amino acid sequence is present in loop VIII. In some embodiments, an AAV capsid variant described herein comprises the amino acid sequence of YPAEVVQK (SEQ ID NO: 943), wherein the amino acid sequence is present immediately subsequent to position 576, relative to a reference sequence numbered according to the amino acid sequence of SEQ ID NO: 138. In some embodiments, an AAV capsid variant described herein comprises the amino acid sequence of YPAEVVQK (SEQ ID NO: 943), wherein the amino acid sequence of YPAEVVQK (SEQ ID NO: 943) replaces position 577 (e.g., T577), relative to a reference sequence numbered according to the amino acid sequence of SEQ ID NO: 138. In some embodiments, an AAV capsid variant described herein comprises the amino acid sequence of YPAEVVQK (SEQ ID NO: 943), wherein the amino acid sequence of YPAEVVQK (SEQ ID NO: 943) is present immediately subsequent to position 576, and wherein the amino acid sequence of YPAEVVQK (SEQ ID NO: 943) replaces position 577 (e.g., T577), relative to a reference sequence numbered according to the amino acid sequence of SEQ ID NO: 138.

[1151] In some embodiments, an AAV capsid variant described herein comprises the amino acid Y at position 577, and further comprises the amino acid sequence of PAEVVQK (SEQ ID NO: 20), which is present immediately subsequent to position 577, numbered relative to SEQ ID NO: 138.

[1152] In some embodiments, an AAV capsid variant described herein comprises the amino acid Y at position 577 and the amino acid sequence of PAEVVQK (SEQ ID NO: 20) at positions 578-584, numbered relative to SEQ ID NO: 982.

[1153] In some embodiments, an AAV capsid variant described herein comprises the amino acid sequence of TNNQSSYPAEVVQKTA (SEQ ID NO: 1533), wherein the amino acid sequence is present in loop VIII. In some embodiments, the AAV capsid variant comprises TNNQSSYPAEVVQKTA (SEQ ID NO: 1533) and is present immediately subsequent to position 570, numbered relative to SEQ ID NO: 138, wherein YPAEVVQK (SEQ ID NO: 943) replaces position 577 (e.g., replaces T577) numbered relative to SEQ ID NO: 138.

[1154] In some embodiments, the AAV capsid variant further one, two, three or all of an amino acid other than Q at position 574 (e.g., T, S, A, I, L, or H), an amino acid other than S at position 575 (e.g., G, A, L, T, or R), and/or an amino acid other than S at position 576 (e.g., K, L, R, A, Y, or T), relative to a reference sequence numbered according to the amino acid sequence of SEQ ID NO: 138. In some embodiments, the AAV capsid variant further comprises a Q at position 574, an S at position 575, and/or an S at position 576, relative to a reference sequence numbered according to the amino acid sequence of SEQ ID NO: 138. In some embodiments, the AAV capsid variant further comprises a T at position 574, an S at position 575, and/or a L at position 576, relative to a reference sequence numbered according to the amino acid sequence of SEQ ID NO: 138. In some embodiments, the AAV capsid variant further comprises an S at position 574, an S at position 575, and/or an S at position 576, relative to a reference sequence numbered according to the amino acid sequence of SEQ ID NO: 138. In some embodiments, the AAV capsid variant further comprises a Q at position 574, an S at position 575, and/or an R at position 576, relative to a reference sequence numbered according to the amino acid sequence of SEQ ID NO: 138. In some embodiments, the AAV capsid variant further comprises Q at position 574, an S at position 575, and/or a K at position 576, relative to a reference sequence numbered according to the amino acid sequence of SEQ ID NO: 138. In some embodiments, the AAV capsid variant further comprises an A at position 574, a G at position 575, and/or an A at position 576, relative to a reference sequence numbered according to the amino acid sequence of SEQ ID NO: 138. In some embodiments, the AAV capsid variant further comprises an I at position 574, a G at position 575, and/or an S at position 576, relative to a reference sequence numbered according to the amino acid sequence of SEQ ID NO: 138. In some embodiments, the AAV capsid variant further comprises a Q at position 574, an A at position 575, and/or an S at position 576, relative to a reference sequence numbered according to the amino acid sequence of SEQ ID NO: 138. In some embodiments, the AAV capsid variant further comprises an A at position 574, an S at position 575, and/or an S at position 576, relative to a reference sequence numbered according to the amino acid sequence of SEQ ID NO: 138. In some embodiments, the AAV capsid variant further comprises an L at position 574, a G at position 575, and/or an S at position 576, relative to a reference sequence numbered according to the amino acid sequence of SEQ ID NO: 138. In some embodiments, the AAV capsid variant further comprises a Q at position 574, an S at position 575, and/or a T at position 576, relative to a reference sequence numbered according to the amino acid sequence of SEQ ID NO: 138. In some embodiments, the AAV capsid variant further comprises an H at position 574, an S at position 575, and/or an S at position 576, relative to a reference sequence numbered according to the amino acid sequence of SEQ ID NO: 138. In some embodiments, the AAV capsid variant further comprises an L at position 574, an S at position 575, and/or an S at position 576, relative to a reference sequence numbered according to the amino acid sequence of SEQ ID NO: 138. In some embodiments, the AAV capsid variant further comprises a Q at position 574, an R at position 575, and/or an S at position 576, relative to a reference sequence numbered according to the amino acid sequence of SEQ ID NO: 138. In some embodiments, the AAV capsid variant further comprises an S at position 574, an L at position 575, and/or an S at position 576, relative to a reference sequence numbered according to the amino acid sequence of SEQ ID NO: 138. In some embodiments, the AAV capsid variant further comprises an S at position 574, an L at position 575, and/or a Y at position 576, relative to a reference sequence numbered according to the amino acid sequence of SEQ ID NO: 138. In some embodiments, the AAV capsid variant further comprises an S at position 574, an A at position 575, and/or a T at position 576, relative to a reference sequence numbered according to the amino acid sequence of SEQ ID NO: 138. In some embodiments, the AAV capsid variant further comprises a Q at position 574, a T at position 575, and/or an S at position 576, relative to a reference sequence numbered according to the amino acid sequence of SEQ ID NO: 138.

[1155] In some embodiments, the AAV capsid variant comprises amino acid other than Q at position 574 (e.g., S), relative to a reference sequence numbered according to the amino acid sequence of SEQ ID NO: 138. In some embodiments, the AAV capsid variant comprises S at position 574, relative to a reference sequence numbered according to the amino acid sequence of SEQ ID NO: 138.

[1156] In some embodiments, the AAV capsid variant further comprises one or both of an amino acid other than T at position 571 (e.g., I or N), and/or an amino acid other than N at position 573 (e.g., T, S, or K), relative to a reference sequence numbered according to the amino acid sequence of SEQ ID NO: 138. In some embodiments, the AAV capsid variant further comprises an R at position 456, relative to a reference sequence numbered according to the amino acid sequence of SEQ ID NO: 138. In some embodiments, the AAV capsid variant further comprises a T at position 571, an N at position 572, and/or an N at position 573, relative to a reference sequence numbered according to the amino acid sequence of SEQ ID NO: 138. In some embodiments, the AAV capsid variant further comprises a T at position 571, an N at position 572, and/or a T at position 573, relative to a reference sequence numbered according to the amino acid sequence of SEQ ID NO: 138. In some embodiments, the AAV capsid variant further comprises an I at position 571, an N at position 572, and/or an N at position 573, relative to a reference sequence numbered according to the amino acid sequence of SEQ ID NO: 138. In some embodiments, the AAV capsid variant further comprises a T at position 571, an N at position 572, and/or an S at position 573, relative to a reference sequence numbered according to the amino acid sequence of SEQ ID NO: 138. In some embodiments, the AAV capsid variant further comprises an N at position 571, an N at position 572, and/or an N at position 573, relative to a reference sequence numbered according to the amino acid sequence of SEQ ID NO: 138. In some embodiments, the AAV capsid variant further comprises a T at position 571, an N at position 572, and/or a K at position 573, relative to a reference sequence numbered according to the amino acid sequence of SEQ ID NO: 138.

[1157] In some embodiments, the AAV capsid variant further comprises an amino acid other than T at position 578 (e.g., P or N), relative to a reference sequence numbered according to the amino acid sequence of SEQ ID NO: 138. In some embodiments, the AAV capsid variant further comprises one or both of an amino acid other than T at position 578 (e.g., P or N), and/or an amino acid other than A at position 589 (e.g., D), relative to a reference sequence numbered according to the amino acid sequence of SEQ ID NO: 138. In some embodiments, the AAV capsid variant further comprises a T at position 578 and/or an A at position 588, relative to a reference sequence numbered according to the amino acid sequence of SEQ ID NO: 138. In some embodiments, the AAV capsid variant further comprises a P at position 578 and/or an A at position 588, relative to a reference sequence numbered according to the amino acid sequence of SEQ ID NO: 138. In some embodiments, the AAV capsid variant further comprises an N at position 578 and/or an A at position 588, relative to a reference sequence numbered according to the amino acid sequence of SEQ ID NO: 138. In some embodiments, the AAV capsid variant further comprises a T at position 578 and/or a D at position 579, relative to a reference sequence numbered according to the amino acid sequence of SEQ ID NO: 138.

[1158] In some embodiments, the AAV capsid variant further comprises an amino acid other than T (e.g., Y) at position 577, relative to a reference sequence numbered according to the amino acid sequence of SEQ ID NO: 138. In some embodiments, the AAV capsid variant comprises Y at position 577, relative to a reference sequence numbered according to the amino acid sequence of SEQ ID NO: 138.

[1159] In some embodiments, the AAV capsid variant further comprises a modification, e.g., an insertion, substitution, and/or deletion in loop I, II, IV, and/or VI. In some embodiments, loop I, II, IV, VI, and VIII can be identified as described in Govindasamy et al. Structurally Mapping the Diverse Phenotype of Adeno-Associated Virus Serotype 4. Journal of Virology. 2006 December 80 (23): 11556-11570; and Govindasamy et al. Structural Insights into Adeno-Associated Virus Serotype 5. Journal of Virology. 2013 October 87 (20): 11187-11199; the contents of which are each hereby incorporated by reference in their entirety.

[1160] In some embodiments, additional modifications, e.g., substitutions (e.g., conservative substitutions), insertions, and/or deletions can be introduced into an AAV capsid variant described herein at positions determined using a structural map of wild-type AAV5, e.g., a structural map described and generated by Govindasamy et al. et al. Structural Insights into Adeno-Associated Virus Serotype 5. Journal of Virology. 2013 October 87 (20): 11187-11199 (the contents of which are hereby incorporated herein by reference in their entirety) or Walters et al. “Structure of Adeno-Associated Virus Serotype 5,” Journal of Virology, 2004, 78 (7): 3361-3371 (the contents of which are hereby incorporated by reference in their entirety).

[1161] In some embodiments, an AAV capsid variant described herein comprises a modification as described in Jose et al. “High-Resolution Structural Characterization of a New Adenoassociated Virus Serotype 5 Antibody Epitope toward Engineering Antibody-Resistant Recombinant Gene Delivery Vectors,” Journal of Virology, 2020, 93 (1): e01394-18; Qian et al. “Directed Evolution of AAV Serotype 5 for Increased Hepatocyte Transduction and Retained Low Humoral Seroreactivity,” Molecular Therapy: Methods and Clinical Development, 2021, 20:122-132; Afione et al. “Identification and Mutagenesis of the Adeno-Associated Virus 5 Sialic Acid Binding Region,” Journal of Virology, 2015, 89 (3): 1660-1672; and/or Wang et al. “Directed evolution of adeno-associated virus 5 capsid enables specific liver tropism,” Mol Ther Nucleic Acids, 2022, 28:293-306; the contents of each of which are hereby incorporated by reference in their entirety.

[1162] In some embodiments, the AAV capsid variant, further comprises an amino acid sequence comprising at least one, two or three modifications, e.g., substitutions (e.g., conservative substitutions), insertions, or deletions, but not more than 30, 20 or 10 modifications, e.g., substitutions (e.g., conservative substitutions), insertions, or deletions, of the amino acid sequence of SEQ ID NO: 138. In some embodiments, the AAV capsid variant, further comprises an amino acid sequence comprising at least one, two or three, but not more than 30, 20 or 10 different amino acids relative to the amino acid sequence of SEQ ID NO: 138. In some embodiments, the AAV capsid variant further comprises the amino acid sequence of SEQ ID NO: 138, or an amino acid sequence with at least 70% (e.g., at least about 80, 85, 90, 95, 96, 97, 98, or 99%) sequence identity thereto.

[1163] In some embodiments, the AAV capsid variant further comprises an amino acid sequence encoded by the nucleotide sequence of SEQ ID NO: 137, or a sequence with at least 70% (e.g., at least about 80, 85, 90, 95, 96, 97, 98, or 99%) sequence identity thereto. In some embodiments, the AAV capsid variant further comprises an amino acid sequence encoded by a nucleotide sequence comprising at least one, two or three modifications, e.g., substitutions, insertions, or deletions, but not more than 30, 20 or 10 modifications, e.g., substitutions, insertions, or deletions, relative to the nucleotide sequence of SEQ ID NO: 137. In some embodiments, the AAV capsid variant further comprises an amino acid sequence encoded by a nucleotide sequence comprising at least one, two or three, but not more than 30, 20 or 10 different nucleotides, relative to the amino acid sequence of SEQ ID NO: 137.

[1164] In some embodiments, the nucleotide sequence encoding the AAV capsid variant further comprises the nucleotide sequence of SEQ ID NO: 137, or a sequence with at least 70% (e.g., at least about 80, 85, 90, 95, 96, 97, 98, or 99%) sequence identity thereto. In some embodiments, the nucleotide sequence encoding the AAV capsid variant further comprises a nucleotide sequence comprising at least one, two or three modifications, e.g., substitutions, insertions, or deletions, but not more than 30, 20 or 10 modifications, e.g., substitutions, insertions, or deletions, relative to the nucleotide sequence of SEQ ID NO: 137. In some embodiments, the nucleotide sequence encoding the AAV capsid variant further comprises a nucleotide sequence comprising at least one, two or three, but not more than 30, 20 or 10 different nucleotides, relative to the amino acid sequence of SEQ ID NO: 137.

[1165] In some embodiments, an AAV capsid variant of the present disclosure comprises an amino acid sequence as described herein, e.g., an amino acid sequence of an AAV capsid variant of TTN-002, TTN-003, TTN-004, TTN-005, or TTN-006, e.g., as described in Tables 3 and 4. In some embodiments, an AAV capsid variant of the present disclosure comprises an amino acid sequence as described herein, e.g., an amino acid sequence of an AAV capsid variant of TTN-002, e.g., as described in Tables 3 and 4.

[1166] In some embodiments, an AAV capsid variant described herein comprises a VP1, VP2, and/or VP3 protein comprising an amino acid sequence described herein, e.g., an amino acid sequence of an AAV capsid variant of TTN-002, TTN-003, TTN-004, TTN-005, or TTN-006, e.g., as described in Tables 3 and 4. In some embodiments, an AAV capsid variant described herein comprises a VP1, VP2, and/or VP3 protein comprising an amino acid sequence described herein, e.g., an amino acid sequence of an AAV capsid variant of TTN-002, e.g., as described in Tables 3 and 4.

[1167] In some embodiments, an AAV capsid variant described herein comprises an amino acid sequence encoded by a nucleotide sequence as described herein, e.g., a nucleotide sequence of an AAV capsid variant of TTN-002, e.g., as described in Tables 3 and 5.

[1168] In some embodiments, a polynucleotide or nucleic acid encoding an AAV capsid variant, of the present disclosure comprises a nucleotide sequence described herein, e.g., a nucleotide sequence of an AAV capsid variant of TTN-002, e.g., as described in Tables 3 and 5.

TABLE 3
Exemplary full length capsid sequences

| | VP1 DNA | VP1 | Peptide | DNA encoding |
|---|---|---|---|---|
| | SEQ ID | Amino Acid | SEQ ID | Peptide SEQ ID |
| Name | NO: | SEQ ID NO: | NO: | NO: |
| TTN-002 | 984 | 982 | 943 | 944 |

TABLE 4
Exemplary full length capsid amino acid sequences

| | SEQ | |
|---|---|---|
| Name and | ID | |
| Annotation | NO: | Amino Acid Sequence |
| TTN-002 | 982 | MSFVDHPPDWLEEVGEGLREFLGLEAGPPKPKPNQQHQDQARGLVLPGYNYLGPGN |
| 8 mer peptide | | GLDRGEPVNRADEVAREHDISYNEQLEAGDNPYLKYNHADAEFQEKLADDTSFGGN |
| underlined, | | LGKAVFQAKKRVLEPFGLVEEGAKTAPTGKRIDDHFPKRKKARTEEDSKPSTSSDA |
| starts at | | EAGPSGSQQLQIPAQPASSLGADTMSAGGGGPLGDNNQGADGVGNASGDWHCDSTW |
| position 577 | | MGDRVVTKSTRTWVLPSYNNHQYREIKSGSVDGSNANAYFGYSTPWGYFDFNRFHS |
| (immediately | | HWSPRDWQRLINNYWGFRPRSLRVKIFNIQVKEVTVQDSTTTIANNLTSTVQVFTD |
| subsequent to | | DDYQLPYVVGNGTEGCLPAFPPQVFTLPQYGYATLNRDNTENPTERSSFFCLEYFP |
| position 576) | | SKMLRTGNNFEFTYNFEEVPFHSSFAPSQNLFKLANPLVDQYLYRFVSTNNTGGVQ |
| | | FNKNLAGRYANTYKNWFPGPMGRTQGWNLGSGVNRASVSAFATTNRMELEGASYQV |
| | | PPQPNGMTNNLQGSNTYALENTMIFNSQPANPGTTATYLEGNMLITSESETQPVNR |
| | | VAYNVGGQMATNNQSSYPAEVVQKTAPATGTYNLQEIVPGSVWMERDVYLQGPIWA |
| | | KIPETGAHFHPSPAMGGFGLKHPPPMMLIKNTPVPGNITSFSDVPVSSFITQYSTG |
| | | QVTVEMEWELKKENSKRWNPEIQYTNNYNDPQFVDFAPDSTGEYRTTRPIGTRYLT |
| | | RPL |
| TTN-002 VP2 | 738 | TAPTGKRIDDHFPKRKKARTEEDSKPSTSSDAEAGPSGSQQLQIPAQPASSLGADT |
| (positions 137- | | MSAGGGGPLGDNNQGADGVGNASGDWHCDSTWMGDRVVTKSTRTWVLPSYNNHQYR |
| 731 of SEQ ID | | EIKSGSVDGSNANAYFGYSTPWGYFDFNRFHSHWSPRDWQRLINNYWGFRPRSLRV |
| NO: 982; 8 mer | | KIFNIQVKEVTVQDSTTTIANNLTSTVQVFTDDDYQLPYVVGNGTEGCLPAFPPQV |
| peptide | | FTLPQYGYATLNRDNTENPTERSSFFCLEYFPSKMLRTGNNFEFTYNFEEVPFHSS |
| underlined) | | FAPSQNLFKLANPLVDQYLYRFVSTNNTGGVQFNKNLAGRYANTYKNWFPGPMGRT |
| | | QGWNLGSGVNRASVSAFATTNRMELEGASYQVPPQPNGMTNNLQGSNTYALENTMI |
| | | FNSQPANPGTTATYLEGNMLITSESETQPVNRVAYNVGGQMATNNQSSYPAEVVQK |
| | | TAPATGTYNLQEIVPGSVWMERDVYLQGPIWAKIPETGAHFHPSPAMGGFGLKHPP |
| | | PMMLIKNTPVPGNITSFSDVPVSSFITQYSTGQVTVEMEWELKKENSKRWNPEIQY |
| | | TNNYNDPQFVDFAPDSTGEYRTTRPIGTRYLTRPL |
| TTN-002 VP3 | 739 | MSAGGGGPLGDNNQGADGVGNASGDWHCDSTWMGDRVVTKSTRTWVLPSYNNHQYR |
| (positions 193- | | EIKSGSVDGSNANAYFGYSTPWGYFDFNRFHSHWSPRDWQRLINNYWGFRPRSLRV |
| 731 of SEQ ID | | KIFNIQVKEVTVQDSTTTIANNLTSTVQVFTDDDYQLPYVVGNGTEGCLPAFPPQV |
| NO: 982; 8 mer | | FTLPQYGYATLNRDNTENPTERSSFFCLEYFPSKMLRTGNNFEFTYNFEEVPFHSS |
| peptide | | FAPSQNLFKLANPLVDQYLYRFVSTNNTGGVQFNKNLAGRYANTYKNWFPGPMGRT |
| underlined) | | QGWNLGSGVNRASVSAFATTNRMELEGASYQVPPQPNGMTNNLQGSNTYALENTMI |
| | | FNSQPANPGTTATYLEGNMLITSESETQPVNRVAYNVGGQMATNNQSSYPAEVVQK |
| | | TAPATGTYNLQEIVPGSVWMERDVYLQGPIWAKIPETGAHFHPSPAMGGFGLKHPP |
| | | PMMLIKNTPVPGNITSFSDVPVSSFITQYSTGQVTVEMEWELKKENSKRWNPEIQY |
| | | TNNYNDPQFVDFAPDSTGEYRTTRPIGTRYLTRPL |
| TTN-003 | 740 | MSFVDHPPDWLEEVGEGLREFLGLEAGPPKPKPNQQHQDQARGLVLPGYNYLGPGN |
| Modifications | | GLDRGEPVNRADEVAREHDISYNEQLEAGDNPYLKYNHADAEFQEKLADDTSFGGN |
| at positions | | LGKAVFQAKKRVLEPFGLVEEGAKTAPTGKRIDDHFPKRKKARTEEDSKPSTSSDA |
| 574-577, and 7- | | EAGPSGSQQLQIPAQPASSLGADTMSAGGGGPLGDNNQGADGVGNASGDWHCDSTW |
| mer insert | | MGDRVVTKSTRTWVLPSYNNHQYREIKSGSVDGSNANAYFGYSTPWGYFDFNRFHS |
| present | | HWSPRDWQRLINNYWGFRPRSLRVKIFNIQVKEVTVQDSTTTIANNLTSTVQVFTD |
| immediately | | DDYQLPYVVGNGTEGCLPAFPPQVFTLPQYGYATLNRDNTENPTERSSFFCLEYFP |
| subsequent to | | SKMLRTGNNFEFTYNFEEVPFHSSFAPSQNLFKLANPLVDQYLYRFVSTNNTGGVQ |
| position 577 | | FNKNLAGRYANTYKNWFPGPMGRTQGWNLGSGVNRASVSAFATTNRMELEGASYQV |
| underlined | | PPQPNGMTNNLQGSNTYALENTMIFNSQPANPGTTATYLEGNMLITSESETQPVNR |
| | | VAYNVGGQMATNNAGAYPAEVVQKTAPATGTYNLQEIVPGSVWMERDVYLQGPIWA |
| | | KIPETGAHFHPSPAMGGFGLKHPPPMMLIKNTPVPGNITSFSDVPVSSFITQYSTG |
| | | QVTVEMEWELKKENSKRWNPEIQYTNNYNDPQFVDFAPDSTGEYRTTRPIGTRYLT |
| | | RPL |
| TTN-004 | 741 | MSFVDHPPDWLEEVGEGLREFLGLEAGPPKPKPNQQHQDQARGLVLPGYNYLGPGN |
| Modifications | | GLDRGEPVNRADEVAREHDISYNEQLEAGDNPYLKYNHADAEFQEKLADDTSFGGN |
| at positions | | LGKAVFQAKKRVLEPFGLVEEGAKTAPTGKRIDDHFPKRKKARTEEDSKPSTSSDA |
| 573-575, 577, | | EAGPSGSQQLQIPAQPASSLGADTMSAGGGGPLGDNNQGADGVGNASGDWHCDSTW |
| and 7-mer | | MGDRVVTKSTRTWVLPSYNNHQYREIKSGSVDGSNANAYFGYSTPWGYFDFNRFHS |
| insert present | | HWSPRDWQRLINNYWGFRPRSLRVKIFNIQVKEVTVQDSTTTIANNLTSTVQVFTD |
| immediately | | DDYQLPYVVGNGTEGCLPAFPPQVFTLPQYGYATLNRDNTENPTERSSFFCLEYFP |
| subsequent to | | SKMLRTGNNFEFTYNFEEVPFHSSFAPSQNLFKLANPLVDQYLYRFVSTNNTGGVQ |
| position 577 | | FNKNLAGRYANTYKNWFPGPMGRTQGWNLGSGVNRASVSAFATTNRMELEGASYQV |
| underlined | | PPQPNGMTNNLQGSNTYALENTMIFNSQPANPGTTATYLEGNMLITSESETQPVNR |
| | | VAYNVGGQMATNSTHSYPAEVVQKTAPATGTYNLQEIVPGSVWMERDVYLQGPIWA |
| | | KIPETGAHFHPSPAMGGFGLKHPPPMMLIKNTPVPGNITSFSDVPVSSFITQYSTG |
| | | QVTVEMEWELKKENSKRWNPEIQYTNNYNDPQFVDFAPDSTGEYRTTRPIGTRYLT |
| | | RPL |
| TTN-005 | 742 | MSFVDHPPDWLEEVGEGLREFLGLEAGPPKPKPNQQHQDQARGLVLPGYNYLGPGN |
| Modifications | | GLDRGEPVNRADEVAREHDISYNEQLEAGDNPYLKYNHADAEFQEKLADDTSFGGN |
| at positions | | LGKAVFQAKKRVLEPFGLVEEGAKTAPTGKRIDDHFPKRKKARTEEDSKPSTSSDA |
| 574, 575, 577, | | EAGPSGSQQLQIPAQPASSLGADTMSAGGGGPLGDNNQGADGVGNASGDWHCDSTW |
| and 7-mer | | MGDRVVTKSTRTWVLPSYNNHQYREIKSGSVDGSNANAYFGYSTPWGYFDFNRFHS |
| insert present | | HWSPRDWQRLINNYWGFRPRSLRVKIFNIQVKEVTVQDSTTTIANNLTSTVQVFTD |
| immediately | | DDYQLPYVVGNGTEGCLPAFPPQVFTLPQYGYATLNRDNTENPTERSSFFCLEYFP |
| subsequent to | | SKMLRTGNNFEFTYNFEEVPFHSSFAPSQNLFKLANPLVDQYLYRFVSTNNTGGVQ |
| position 577 | | FNKNLAGRYANTYKNWFPGPMGRTQGWNLGSGVNRASVSAFATTNRMELEGASYQV |
| underlined | | PPQPNGMTNNLQGSNTYALENTMIFNSQPANPGTTATYLEGNMLITSESETQPVNR |
| | | VAYNVGGQMATNNIGSYPAEVVQKTAPATGTYNLQEIVPGSVWMERDVYLQGPIWA |
| | | KIPETGAHFHPSPAMGGFGLKHPPPMMLIKNTPVPGNITSFSDVPVSSFITQYSTG |
| | | QVTVEMEWELKKENSKRWNPEIQYTNNYNDPQFVDFAPDSTGEYRTTRPIGTRYLT |
| | | RPL |
| TTN-006 | 743 | MSFVDHPPDWLEEVGEGLREFLGLEAGPPKPKPNQQHQDQARGLVLPGYNYLGPGN |
| Modification at | | GLDRGEPVNRADEVAREHDISYNEQLEAGDNPYLKYNHADAEFQEKLADDTSFGGN |
| position 577 | | LGKAVFQAKKRVLEPFGLVEEGAKTAPTGKRIDDHFPKRKKARTEEDSKPSTSSDA |
| and 7-mer | | EAGPSGSQQLQIPAQPASSLGADTMSAGGGGPLGDNNQGADGVGNASGDWHCDSTW |
| insert present | | MGDRVVTKSTRTWVLPSYNNHQYREIKSGSVDGSNANAYFGYSTPWGYFDFNRFHS |
| immediately | | HWSPRDWQRLINNYWGFRPRSLRVKIFNIQVKEVTVQDSTTTIANNLTSTVQVFTD |
| subsequent to | | DDYQLPYVVGNGTEGCLPAFPPQVFTLPQYGYATLNRDNTENPTERSSFFCLEYFP |
| position 577 | | SKMLRTGNNFEFTYNFEEVPFHSSFAPSQNLFKLANPLVDQYLYRFVSTNNTGGVQ |
| underlined | | FNKNLAGRYANTYKNWFPGPMGRTQGWNLGSGVNRASVSAFATTNRMELEGASYQV |
| | | PPQPNGMTNNLQGSNTYALENTMIFNSQPANPGTTATYLEGNMLITSESETQPVNR |
| | | VAYNVGGQMATNNQSSYPAERSHKTAPATGTYNLQEIVPGSVWMERDVYLQGPIWA |
| | | KIPETGAHFHPSPAMGGFGLKHPPPMMLIKNTPVPGNITSFSDVPVSSFITQYSTG |
| | | QVTVEMEWELKKENSKRWNPEIQYTNNYNDPQFVDFAPDSTGEYRTTRPIGTRYLT |
| | | RPL |

TABLE 5
Exemplary full length capsid nucleic acid sequences

| | SEQ | |
|---|---|---|
| Name and | ID | |
| Annotation | NO: | NT Sequence |
| TTN-002 | 984 | ATGTCTTTTGTTGATCACCCTCCAGATTGGTTGGAAGAAGTTGGTGAAGGTCTTCG |
| Nucleotide | | CGAGTTTTTGGGCCTTGAAGCGGGCCCACCGAAACCAAAACCCAATCAGCAGCATC |
| sequence | | AAGATCAAGCCCGTGGTCTTGTGCTGCCTGGTTATAACTATCTCGGACCCGGAAAC |
| encoding 8 mer | | GGTCTCGATCGAGGAGAGCCTGTCAACAGGGCAGACGAGGTCGCGCGAGAGCACGA |
| peptide | | CATCTCGTACAACGAGCAGCTTGAGGCGGGAGACAACCCCTACCTCAAGTACAACC |
| underlined | | ACGCGGACGCCGAGTTTCAGGAGAAGCTCGCCGACGACACATCCTTCGGGGGAAAC |
| | | CTCGGAAAGGCAGTCTTTCAGGCCAAGAAAAGGGTTCTCGAACCTTTTGGCCTGGT |
| | | TGAAGAGGGTGCTAAGACGGCCCCTACCGGAAAGCGGATAGACGACCACTTTCCAA |
| | | AAAGAAAGAAGGCCCGGACCGAAGAGGACTCCAAGCCTTCCACCTCGTCAGACGCC |
| | | GAAGCTGGACCCAGCGGATCCCAGCAGCTGCAAATCCCAGCCCAACCAGCCTCAAG |
| | | TTTGGGAGCTGATACAATGTCTGCGGGAGGTGGCGGCCCATTGGGCGACAATAACC |
| | | AAGGTGCCGATGGAGTGGGCAATGCCTCGGGAGATTGGCATTGCGATTCCACGTGG |
| | | ATGGGGGACAGAGTCGTCACCAAGTCCACCCGAACCTGGGTGCTGCCCAGCTACAA |
| | | CAACCACCAGTACCGAGAGATCAAAAGCGGCTCCGTCGACGGAAGCAACGCCAACG |
| | | CCTACTTTGGATACAGCACCCCCTGGGGGTACTTTGACTTTAACCGCTTCCACAGC |
| | | CACTGGAGCCCCCGAGACTGGCAAAGACTCATCAACAACTACTGGGGCTTCAGACC |
| | | CCGGTCCCTCAGAGTCAAAATCTTCAACATTCAAGTCAAAGAGGTCACGGTGCAGG |
| | | ACTCCACCACCACCATCGCCAACAACCTCACCTCCACCGTCCAAGTGTTTACGGAC |
| | | GACGACTACCAGCTGCCCTACGTCGTCGGCAACGGGACCGAGGGATGCCTGCCGGC |
| | | CTTCCCTCCGCAGGTCTTTACGCTGCCGCAGTACGGTTACGCGACGCTGAACCGCG |
| | | ACAACACAGAAAATCCCACCGAGAGGAGCAGCTTCTTCTGCCTAGAGTACTTTCCC |
| | | AGCAAGATGCTGAGAACGGGCAACAACTTTGAGTTTACCTACAACTTTGAGGAGGT |
| | | GCCCTTCCACTCCAGCTTCGCTCCCAGTCAGAACCTCTTCAAGCTGGCCAACCCGC |
| | | TGGTGGACCAGTACTTGTACCGCTTCGTGAGCACAAATAACACTGGCGGAGTCCAG |
| | | TTCAACAAGAACCTGGCCGGGAGATACGCCAACACCTACAAAAACTGGTTCCCGGG |
| | | GCCCATGGGCCGAACCCAGGGCTGGAACCTGGGCTCCGGGGTCAACCGCGCCAGTG |
| | | TCAGCGCCTTCGCCACGACCAATAGGATGGAGCTCGAGGGCGCGAGTTACCAGGTG |
| | | CCCCCGCAGCCGAACGGCATGACCAACAACCTCCAGGGCAGCAACACCTATGCCCT |
| | | GGAGAACACTATGATCTTCAACAGCCAGCCGGCGAACCCGGGCACCACCGCCACGT |
| | | ACCTCGAGGGCAACATGCTCATCACCAGCGAGAGCGAGACGCAGCCGGTGAACCGC |
| | | GTGGCGTACAACGTCGGCGGGCAGATGGCCACCAACAACCAGAGCTCTTATCCGGC |
| | | GGAGGTGGTGCAGAAGactgcccccgcgaccggcaCGTACAACCTCCAGGAAATCG |
| | | TGCCCGGCAGCGTGTGGATGGAGAGGGACGTGTACCTCCAAGGACCCATCTGGGCC |
| | | AAGATCCCAGAGACGGGGGCGCACTTTCACCCCTCTCCGGCtATGGGCGGATTCGG |
| | | ACTCAAACACCCACCGCCCATGATGCTCATCAAGAACACGCCTGTGCCCGGAAATA |
| | | TCACCAGCTTCTCGGACGTGCCCGTCAGCAGCTTCATCACCCAGTACAGCACCGGG |
| | | CAGGTCACCGTGGAGATGGAGTGGGAGCTCAAGAAGGAAAACTCCAAGAGGTGGAA |
| | | CCCAGAGATCCAGTACACAAACAACTACAACGACCCCCAGTTTGTGGACTTTGCCC |
| | | CGGACAGCACCGGGGAATACAGAACCACCAGACCTATCGGAACCCGATACCTTACC |
| | | CGACCCCTTTAA |

[1169] In some embodiments, an AAV capsid variant described herein comprises the amino acid sequence of SEQ ID NO: 982, or an amino acid sequence with at least 70% (e.g., at least about 80, 85, 90, 95, 96, 97, 98, or 99%) sequence identity thereto. In some embodiments, an AAV capsid variant described herein comprises the amino acid sequence of SEQ ID NO: 982 or an amino acid sequence with at least 90% sequence identity thereto. In some embodiments, an AAV capsid variant described herein comprises the amino acid sequence of SEQ ID NO: 982 or an amino acid sequence with at least 95% sequence identity thereto. In some embodiments, an AAV capsid variant described herein comprises the amino acid sequence of SEQ ID NO: 982 or an amino acid sequence with at least 96% sequence identity thereto. In some embodiments, an AAV capsid variant described herein comprises the amino acid sequence of SEQ ID NO: 982 or an amino acid sequence with at least 97% sequence identity thereto. In some embodiments, an AAV capsid variant described herein comprises the amino acid sequence of SEQ ID NO: 982 or an amino acid sequence with at least 98% sequence identity thereto. In some embodiments, an AAV capsid variant described herein comprises the amino acid sequence of SEQ ID NO: 982 or an amino acid sequence with at least 99% sequence identity thereto. In some embodiments, an AAV capsid variant described herein comprises an amino acid sequence comprising at least one, two, or three modifications, e.g., substitutions (e.g., conservative substitutions), insertions, or deletions, but not more than 30, 20 or 10 modifications, e.g., substitutions (e.g., conservative substitutions), insertions, or deletions, relative to the amino acid sequence of SEQ ID NO: 982. In some embodiments, the AAV capsid variant, comprises an amino acid sequence comprising at least one, two or three, but not more than 30, 20 or 10 different amino acids, relative to the amino acid sequence of SEQ ID NO: 982.

[1170] In some embodiments, In some embodiments, an AAV capsid variant described herein comprises the amino acid sequence of any one of SEQ ID NOs: 740-743, or an amino acid sequence with at least 70% (e.g., at least about 80, 85, 90, 95, 96, 97, 98, or 99%) sequence identity thereto. In some embodiments, an AAV capsid variant described herein comprises an amino acid sequence comprising at least one, two, or three modifications, e.g., substitutions (e.g., conservative substitutions), insertions, or deletions, but not more than 30, 20 or 10 modifications, e.g., substitutions (e.g., conservative substitutions), insertions, or deletions, relative to the amino acid sequence of any one of SEQ ID NOs: 740-743. In some embodiments, the AAV capsid variant, comprises an amino acid sequence comprising at least one, two or three, but not more than 30, 20 or 10 different amino acids, relative to the amino acid sequence of any one of SEQ ID NOs: 740-743.

[1171] In some embodiments, an AAV capsid variant described herein comprises an amino acid sequence encoded by the nucleotide sequence of SEQ ID NO: 984, or a nucleotide sequence with at least 70% (e.g., at least about 80, 85, 90, 95, 96, 97, 98, or 99%) sequence identity thereto. In some embodiments, an AAV capsid variant described herein comprises an amino acid sequence encoded by a nucleotide sequence comprising at least one, two or three, but not more than 30, 20 or 10 different nucleotides, relative to the amino acid sequence of SEQ ID NO: 984. In some embodiments, an AAV capsid variant described herein comprises an amino acid sequence encoded by a nucleotide sequence comprising at least one, two or three modifications, e.g., substitutions, insertions, or deletions, but not more than 30, 20 or 10 modifications, e.g., substitutions, insertions, or deletions, relative to the nucleotide sequence of SEQ ID NO: 984.

[1172] In some embodiments, the nucleotide sequence encoding an AAV capsid variant, described herein comprises the nucleotide sequence of SEQ ID NO: 984, or a nucleotide sequence with at least 70% (e.g., at least about 80, 85, 90, 95, 96, 97, 98, or 99%) sequence identity thereto. In some embodiments, the nucleotide sequence encoding an AAV capsid variant described herein comprises the nucleotide sequence of SEQ ID NO: 984, or a nucleotide sequence with at least 70% (e.g., at least about 80, 85, 90, 95, 96, 97, 98, or 99%) sequence identity thereto. In some embodiments, the nucleotide sequence encoding an AAV capsid variant described herein, comprises a nucleotide sequence comprising at least one, two or three modifications, e.g., substitutions, insertions, or deletions, but not more than 30, 20 or 10 modifications, e.g., substitutions, insertions, or deletions, relative to the nucleotide sequence of SEQ ID NO: 984. In some embodiments, the nucleotide sequence encoding an AAV capsid variant described herein, comprises a nucleotide sequence comprising at least one, two or three, but not more than 30, 20 or 10 different nucleotides, relative to the amino acid sequence of SEQ ID NO: 984. In some embodiments, the nucleic acid sequence encoding an AAV capsid variant described herein is codon optimized.

[1173] In some embodiments, an AAV capsid variant described herein comprises a VP1, VP2, VP3 protein, or a combination thereof. In some embodiments, an AAV capsid variant comprises the amino acid sequence corresponding to positions 137-731, e.g., a VP2, of SEQ ID NO: 982, or a sequence with at least 70% (e.g., at least about 80, 85, 90, 95, 96, 97, 98, or 99%) sequence identity thereto. In some embodiments, the AAV capsid protein comprises the amino acid sequence corresponding to positions 193-731, e.g., a VP3, of SEQ ID NO: 982, or a sequence with at least 70% (e.g., at least about 80, 85, 90, 95, 96, 97, 98, or 99%) sequence identity thereto. In some embodiments, the AAV capsid variant comprises the amino acid sequence corresponding to positions 1-731, e.g., a VP1, of SEQ ID NO: 982, or an amino acid sequence with at least 70% (e.g., at least about 80, 85, 90, 95, 96, 97, 98, or 99%) sequence identity thereto.

[1174] In some embodiments, an AAV capsid variant described herein comprises the amino acid sequence of SEQ ID NO: 739, or an amino acid sequence at least 95% (e.g., at least 96, 97, 98, or 99%) identical thereto. In some embodiments, the AAV capsid variant comprises the amino acid sequence of SEQ ID NO: 738, or an amino acid sequence at least 95% (e.g., at least 96, 97, 98, or 99%) identical thereto. In some embodiments, the AAV capsid variant comprises the amino acid sequence of SEQ ID NO: 982, or an amino acid sequence at least 95% (e.g., at least 96, 97, 98, or 99%) identical thereto.

[1175] In some embodiments, an AAV capsid variant described herein comprises the amino acid sequence of SEQ ID NO: 739 (e.g., VP3). In some embodiments, the AAV capsid variant comprises the amino acid sequence of SEQ ID NO: 738 (e.g., VP2). In some embodiments, the AAV capsid variant comprises the amino acid sequence of SEQ ID NO: 982 (e.g., VP1).

[1176] In some embodiments, an AAV capsid variant, described herein has an increased tropism for a CNS cell or tissue, e.g., a brain cell, brain tissue, spinal cord cell, or spinal cord tissue, relative to the tropism of a reference sequence comprising the amino acid sequence of SEQ ID NO: 138.

[1177] In some embodiments, an AAV capsid variant described herein has an increased tropism for a CNS cell or tissue, e.g., a brain cell, brain tissue, spinal cord cell, or spinal cord tissue, relative to the tropism of a reference sequence comprising the amino acid sequence of SEQ ID NO: 982.

[1178] In some embodiments, an AAV capsid variant described herein has an increased tropism for a CNS cell or tissue, e.g., a brain cell, brain tissue, spinal cord cell, or spinal cord tissue, relative to the tropism of a reference sequence comprising the amino acid sequence of SEQ ID NO: 139.

[1179] In some embodiments, an AAV capsid variant described herein transduces a brain region, e.g., a temporal cortex, perirhinal cortex, globus pallidus, putamen, caudate, thalamus, hippocampus, geniculate nucleus, Purkinje Layer, deep cerebellar nuclei, and/or cerebellum. In some embodiments, the level of transduction is at least 0.5, 2.2, 2.4, 2.5, 2.6, 2.7, 3.0, 3.2, 3.5, 3.7, 4.0, 4.2, 4.5, 4.7, 4.9, 5, 10, 15, 20, 25, 30, or 35-fold greater as compared to a reference sequence of SEQ ID NO: 139.

[1180] In some embodiments, an AAV capsid variant described herein is enriched at least about 2, 3, 4, 5, 6, 7, 8, 9, 10, 12, 15, 17, 20, 25, 30, 35, 40, 45, 50, 55, 60, or 65-fold in the brain compared to a reference sequence of SEQ ID NO: 138. In some embodiments, an AAV capsid variant described herein is enriched at least about 10, 12, 15, 17, 20, 25, 30, 35, 40, 45, 50, 55, 60, 61, 62, 63, 64, or 65-fold in the brain compared to a reference sequence of SEQ ID NO: 138.

[1181] In some embodiments, an AAV capsid variant described herein is enriched in the brain of at least two to three species, e.g., a non-human primate and rodent (e.g., mouse and/or rat) species, compared to a reference sequence of SEQ ID NO: 138. In some embodiments, an AAV capsid variant described herein is enriched at least about 2, 3, 4, 5, 6, 7, 8, 9, 10, 12, 15, 17, 20, 25, 30, 35, 40, 45, 50, 60, 70, 80, 90, or 100-fold in the brain of at least two to three species, e.g., a non-human primate and rodent (e.g., mouse and/or rat) species, compared to a reference sequence of SEQ ID NO: 138 or 982. In some embodiments, the at least two to three species are Macaca fascicularis, Chlorocebus sabaeus, Callithrix jacchus, rat and/or mouse (e.g., BALB/c mice).

[1182] In some embodiments, an AAV capsid variant described herein is enriched about 5, 10, 15, 20, 25, 30, 35, 40, 45, 50, 55, 60, 65, 70, 75, 80, 85, 90, 100, 125, 150, 175, 200, or 225-fold in the brain compared to a reference sequence of SEQ ID NO: 982.

[1183] In some embodiments, an AAV capsid variant described herein delivers an increased level of viral genomes to a brain region. In some embodiments, the level of viral genomes is increased by at least 1.5, 2.2, 2.4, 2.5, 2.6, 2.7, 3.0, 3.2, 3.5, 3.7, 4.0, 4.2, 4.5, 4.7, 4.9, or 5-fold, as compared to a reference sequence of SEQ ID NO: 139. In some embodiments, the brain region comprises a midbrain region (e.g., the hippocampus or thalamus) and/or the brainstem.

[1184] In some embodiments, an AAV capsid variant described herein delivers an increased level of a payload to a brain region. In some embodiments, the level of the payload is increased by at least 20, 25, 30, 35-fold, as compared to a reference sequence of SEQ ID NO: 139. In some embodiments, the brain region comprises a temporal cortex, perirhinal cortex, globus pallidus, putamen, caudate, thalamus, hippocampus, geniculate nucleus, Purkinje Layer, deep cerebellar nuclei, cerebellum, or a combination thereof.

[1185] In some embodiments an AAV capsid variant described herein is enriched at least about 3, 3.5, 4.0, 4.5, 5, 5.0, 6.0, or 6.5-fold, in a spinal cord region compared to a reference sequence of SEQ ID NO: 139. In some embodiments, the spinal cord region comprises a cervical spinal cord region, a lumbar spinal cord region, a thoracic spinal cord region, or a combination thereof.

[1186] In some embodiments an AAV capsid variant described herein shows preferential transduction in a brain region relative to the transduction in the dorsal root ganglia (DRG). In some embodiments an AAV capsid variant described herein shows preferential transduction in a brain region relative to the transduction in the liver.

[1187] In some embodiments, an AAV capsid variant described herein is capable of transducing neuronal cells.

[1188] In some embodiments, an AAV capsid variant described herein is capable of transducing non-neuronal cells, e.g., glial cells (e.g., oligodendrocytes or astrocytes). In some embodiments, the AAV capsid variant is capable of transducing neuronal cells and non-neuronal cells, e.g., glial cells (e.g., oligodendrocytes or astrocytes). In some embodiments, the non-neuronal cells are glial cells (e.g., oligodendrocytes or astrocytes).

[1189] In some embodiments, an AAV capsid variant described herein has an increased tropism for a heart cell or heart tissue, e.g., a heart cell or a heart tissue of a heart atrium or a heart ventricle relative to the tropism of a reference sequence comprising the amino acid sequence of SEQ ID NO: 138. In some embodiments, an AAV capsid variant described herein has an increased tropism for a heart cell or heart tissue, e.g., a heart cell or a heart tissue of a heart atrium or a heart ventricle relative to the tropism of a reference sequence comprising the amino acid sequence of SEQ ID NO: 139.

[1190] In some embodiments, an AAV capsid variant described herein delivers an increased level of a payload to a heart region. In some embodiments, the level of the payload is increased by at least 1.5, 2, or 2.5-fold, as compared to a reference sequence of SEQ ID NO: 139.

[1191] In some embodiments, an AAV capsid variant described herein has an increased tropism for a heart cell or heart tissue, e.g., a heart cell or a heart tissue of a heart atrium or a heart ventricle relative to the tropism of a reference sequence comprising the amino acid sequence of SEQ ID NO: 982. In some embodiments, the AAV capsid variant is enriched about 4, 5, 10, 15, 20, 25, 30, 35, 40, 45, or 50-fold, in the heart compared to a reference sequence of SEQ ID NO: 982.

[1192] In some embodiments an AAV capsid variant described herein has an increased tropism for a muscle cell or tissue, relative to the tropism of a reference sequence comprising the amino acid sequence of SEQ ID NO: 982. In some embodiments, the muscle region comprises a quadriceps muscle, and/or a diaphragm muscle region. In some embodiments, the AAV capsid variant is enriched at least about 2, 3, 4, 5, 10, 15, 20, 25, 30, or 35-fold, in the muscle compared to a reference sequence of SEQ ID NO: 982.

[1193] In some embodiments, an AAV capsid variant described herein has increased tropism for a liver cell or liver tissue, relative to the tropism of a reference sequence comprising the amino acid sequence of SEQ ID NO: 982. In some embodiments, the AAV capsid variant is enriched at least about 10, 15, 20, 25, 30, 35, 40, 45, 50, 55, 60, 65, 70, 75, 80, 85, 90, 95, 100, 110, 115, 120, 130, 140, 150, 160, 170, 180, 185, or 190-fold, in the liver, compared to a reference sequence of SEQ ID NO: 982.

[1194] In some embodiments, an AAV capsid variant described herein has decreased tropism for the liver. In some embodiments, an AAV capsid variant comprises a modification, e.g., substitution, insertion, or deletion, that results in reduced tropism (e.g., de-targeting) and/or activity in the liver. In some embodiments, the reduced tropism in the liver is compared to an otherwise similar capsid that does not comprise the modification, e.g., a wild-type capsid polypeptide. In some embodiments, an AAV capsid variant described comprises a modification, e.g., substitution, insertion, or deletion, that results in one or more of the following properties: (1) reduced tropism in the liver; (2) de-targeted expression in the liver; (3) reduced activity in the liver; and/or (4) reduced binding to galactose. In some embodiments, the reduction in any one, or all of properties (1)-(3) is compared to an otherwise similar AAV capsid variant that does not comprise the modification. In some embodiments, the AAV capsid variant, e.g., the AAV capsid variant having reduced tropism in the liver, comprises one or more of: an amino acid other than A, G, K, M, N, Q, R, S, and/or T at position 581; an amino acid other than A, C, H, I, K, S, T, and/or V at position 582; an amino acid other than A, G, H, K, M, N, Q, R, S, T, and/or V at position 583; an amino acid other than L, M, P, Q, R. T and/or W at position 584; an amino acid other than F, H, I, K, M, T and/or Y at position 585; an amino acid other than E, G, H, L, M, N, Q, T, and/or W at position 586; an amino acid other than A, C, G, H, L, M, R, and/or S at position 587; an amino acid other than A, C, D, F, G, H, M, Q, S, V, W, and/or Y at position 588; and/or an amino acid other than A, C, E, G, H, M, N, P, Q, S, V, and/or W at position 589, all numbered relative to SEQ ID NO: 138.

[1195] In some embodiments, an AAV capsid variant of the present disclosure is isolated, e.g., recombinant. In some embodiments, a polynucleotide encoding an AAV capsid polypeptide, e.g., an AAV capsid variant, of the present disclosure is isolated, e.g., recombinant.

[1196] Also provided herein are polynucleotide sequences encoding any of the AAV capsid variants described above and AAV particles, vectors, and cells comprising the same.

### AAV Serotypes and Capsids

[1197] In some embodiments, an AAV particle of the present disclosure may comprise a capsid protein or variant thereof any natural or recombinant AAV serotype. AAV serotypes may differ in characteristics such as, but not limited to, packaging, tropism, transduction and immunogenic profiles. While not wishing to be bound by theory, it is believed in some embodiments, that the AAV capsid protein, e.g., an AAV capsid variant, can modulate AAV particle tropism in a particular tissue.

[1198] In some embodiments, an AAV capsid variant described herein allows for blood brain barrier penetration following intravenous administration. In some embodiments, the AAV capsid variant allows for blood brain barrier penetration following intravenous administration, focused ultrasound (FUS), e.g., coupled with the intravenous administration of microbubbles (FUS-MB), or MRI-guided FUS coupled with intravenous administration. In some embodiments the AAV capsid variant allows for increased distribution to a brain region. In some embodiments, the brain region comprises a temporal cortex, perirhinal cortex, globus pallidus, putamen, caudate, thalamus, hippocampus, geniculate nucleus, Purkinje Layer, deep cerebellar nuclei, cerebellum, frontal cortex, sensory cortex, motor cortex, dentate nucleus, cerebellar cortex, cerebral cortex, brain stem, or a combination thereof. In some embodiments, the AAV capsid variant allows for preferential transduction in a brain region relative to the transduction in the dorsal root ganglia (DRG). In some embodiments, the AAV capsid variant allows for preferential transduction in a brain region relative to the transduction in the liver. In some embodiments, the AAV capsid variant allows for transduction in neuronal cells. In some embodiments, the AAV capsid variant allows for transduction in a non-neuronal cell, e.g., a glial cell (e.g., an astrocyte, an oligodendrocyte, or a combination thereof). In some embodiments, the AAV capsid variant allows for transduction in both neuronal cells and non-neuronal cell, e.g., a glial cell (e.g., an astrocyte, an oligodendrocyte, or a combination thereof).

[1199] In some embodiments, an AAV capsid variant allows for increased distribution to a spinal cord region. In some embodiments, the spinal region comprises a cervical spinal cord region, thoracic spinal cord region, and/or lumbar spinal cord region.

[1200] In some embodiments the AAV capsid variant, allows for increased distribution to a heart region.

[1201] In some embodiments, the AAV capsid variant, is suitable for intramuscular administration and/or transduction of muscle fibers. In some embodiments the AAV capsid variant, allows for increased distribution to a muscle region. In some embodiments, the muscle region comprises a heart muscle, quadriceps muscle, a diaphragm muscle region, or a combination thereof.

[1202] In some embodiments the AAV capsid variant, allows for increased distribution to a liver region.

[1203] In some embodiments, an AAV capsid described herein comprises a modification as described in Jose et al. High-Resolution Structural Characterization of a New Adenoassociated Virus Serotype 5 Antibody Epitope toward Engineering Antibody-Resistant Recombinant Gene Delivery Vectors. Journal of Virology. 2019 January 93 (1): e01394-18; Qian et al. Directed Evolution of AAV Serotype 5 for Increased Hepatocyte Transduction and Retained Low Humoral Seroreactivity. Molecular Therapy: Methods & Clinical Development. 2020 Oct. 20:122-132; Afione et al. Identification and Mutagenesis of the Adeno-Associated Virus 5 Sialic Binding Region. Journal of Virology. 2015 February 89 (3): 1660-1672; the contents of which are each hereby incorporated by reference in their entirety.

[1204] In some embodiments, the initiation codon for translation of the AAV VP1 capsid protein, e.g., a capsid variant, described herein may be CTG, TTG, or GTG as described in U.S. Pat. No. 8,163,543, the contents of which are herein incorporated by reference in its entirety.

[1205] The present disclosure refers to structural capsid proteins (including VP1, VP2 and VP3) which are encoded by capsid (Cap) genes. These capsid proteins form an outer protein structural shell (e.g. capsid) of a viral vector such as AAV. VP capsid proteins synthesized from Cap polynucleotides generally include a methionine as the first amino acid in the peptide sequence (Met1), which is associated with the start codon (AUG or ATG) in the corresponding Cap nucleotide sequence. However, it is common for a first-methionine (Met1) residue or generally any first amino acid (AA1) to be cleaved off after or during polypeptide synthesis by protein processing enzymes such as Met-aminopeptidases. This “Met/AA-clipping” process often correlates with a corresponding acetylation of the second amino acid in the polypeptide sequence (e.g., alanine, valine, serine, threonine, etc.). Met-clipping commonly occurs with VP1 and VP3 capsid proteins but can also occur with VP2 capsid proteins.

[1206] Where the Met/AA-clipping is incomplete, a mixture of one or more (one, two or three) VP capsid proteins comprising the viral capsid may be produced, some of which may include a Met1/AA1 amino acid (Met+/AA+) and some of which may lack a Met1/AA1 amino acid as a result of Met/AA-clipping (Met−/AA−). For further discussion regarding Met/AA-clipping in capsid proteins, see Jin, et al. Direct Liquid Chromatography/Mass Spectrometry Analysis for Complete Characterization of Recombinant Adeno-Associated Virus Capsid Proteins. Hum Gene Ther Methods. 2017 Oct. 28 (5): 255-267; Hwang, et al. N-Terminal Acetylation of Cellular Proteins Creates Specific Degradation Signals. Science. 2010 Feb. 19. 327 (5968): 973-977; the contents of which are each incorporated herein by reference in its entirety.

[1207] According to the present disclosure, references to capsid proteins, e.g., AAV capsid variants, is not limited to either clipped (Met−/AA−) or unclipped (Met+/AA+) and may, in context, refer to independent capsid proteins, viral capsids comprised of a mixture of capsid proteins, and/or polynucleotide sequences (or fragments thereof) which encode, describe, produce or result in capsid proteins of the present disclosure. A direct reference to a capsid protein or capsid polypeptide (such as VP1, VP2 or VP2) may also comprise VP capsid proteins which include a Met1/AA1 amino acid (Met+/AA+) as well as corresponding VP capsid proteins which lack the Met1/AA1 amino acid as a result of Met/AA-clipping (Met−/AA−).

[1208] Further according to the present disclosure, a reference to a specific SEQ ID NO: (whether a protein or nucleic acid) which comprises or encodes, respectively, one or more capsid proteins which include a Met1/AA1 amino acid (Met+/AA+) should be understood to teach the VP capsid proteins which lack the Met1/AA1 amino acid as upon review of the sequence, it is readily apparent any sequence which merely lacks the first listed amino acid (whether or not Met1/AA1).

[1209] As a non-limiting example, reference to a VP1 polypeptide sequence which is 736 amino acids in length and which includes a “Met1” amino acid (Met+) encoded by the AUG/ATG start codon may also be understood to teach a VP1 polypeptide sequence which is 735 amino acids in length and which does not include the “Met1” amino acid (Met−) of the 736 amino acid Met+ sequence. As a second non-limiting example, reference to a VP1 polypeptide sequence which is 736 amino acids in length and which includes an “AA1” amino acid (AA1+) encoded by any NNN initiator codon may also be understood to teach a VP1 polypeptide sequence which is 735 amino acids in length and which does not include the “AA1” amino acid (AA1−) of the 736 amino acid AA1+ sequence.

[1210] References to viral capsids formed from VP capsid proteins (such as reference to specific AAV capsid serotypes), can incorporate VP capsid proteins which include a Met1/AA1 amino acid (Met+/AA1+), corresponding VP capsid proteins which lack the Met1/AA1 amino acid as a result of Met/AA1-clipping (Met−/AA1−), and combinations thereof (Met+/AA1+ and Met−/AA1−).

[1211] As a non-limiting example, an AAV capsid serotype can include VP1 (Met+/AA1+), VP1 (Met−/AA1−), or a combination of VP1 (Met+/AA1+) and VP1 (Met−/AA1−). An AAV capsid serotype can also include VP3 (Met+/AA1+), VP3 (Met−/AA1−), or a combination of VP3 (Met+/AA1+) and VP3 (Met−/AA1−); and can also include similar optional combinations of VP2 (Met+/AA1) and VP2 (Met−/AA1−).

### Additional AAV Sequences

[1212] In some embodiments, the AAV capsid variant, comprises immediately subsequent to position 570, 571, 572, 573, 574, 575, or 576, numbered relative to SEQ ID NO: 138, at least 3, 4, 5, 6, 7, 8, 9, 10, 11, 12, 13, 14, 15, or 16 consecutive amino acids of any of amino acid sequence provided in Tables 1, 2A, 2B, 9, or 15-20.

[1213] In some embodiments, the AAV capsid variant, comprises immediately subsequent to position 570, 571, 572, 573, 574, 575, 576, or 577, numbered relative to SEQ ID NO: 138 or corresponding to equivalent positions in any other AAV serotype (e.g., AAV1, AAV2, AAV3, AAV3b, AAV4, AAV6, AAV7, AAV8, AAV9, AAVrh8, AAVrh10, AAVrh32.33, AAVrh74, SEQ ID NO: 139, PHP.N, PHP.B, or an AAV serotype as provided in Table 6 of WO 2021/230987 (the contents of which are hereby incorporated by reference in their entirety)), at least 3, 4, 5, 6, 7, 8, 9, 10, 11, 12, 13, 14, 15, or 16 consecutive amino acids of any of amino acid sequence provided in Tables 1, 2A, 2B, 9, or 15-22. In some embodiments, the at least 3, 4, 5, 6, 7, 8, 9, 10, 11, 12, 13, 14, 15, or 16 consecutive amino acids of any of amino acid sequence provided in Tables 1, 2A, 2B, 9, or 15-22 replaces at least one, two, three, four, five, six, seven, eight, or all of positions T571, N572, N573, Q574, S575, S576, T577, T578, and/or A579, numbered according to SEQ ID NO: 138 or corresponding to equivalent positions in any other AAV serotype (e.g., AAV1, AAV2, AAV3, AAV3b, AAV4, AAV6, AAV7, AAV8, AAV9, AAVrh8, AAVrh10, AAVrh32.33, AAVrh74, SEQ ID NO: 139, PHP.N, PHP.B, or an AAV serotype as provided in Table 6 of WO 2021/230987 (the contents of which are hereby incorporated by reference in their entirety)). In some embodiments, the at least 3, 4, 5, 6, 7, 8, 9, 10, 11, 12, 13, 14, 15, or 16 consecutive amino acids of any of amino acid sequence provided in Tables 1, 2A, 2B, 9, or 15-22 replaces positions T577, numbered according to SEQ ID NO: 138 or corresponding to equivalent positions in any other AAV serotype (e.g., AAV1, AAV2, AAV3, AAV3b, AAV4, AAV6, AAV7, AAV8, AAV9, AAVrh8, AAVrh10, AAVrh32.33, AAVrh74, SEQ ID NO: 139, PHP.N, PHP.B, or an AAV serotype as provided in Table 6 of WO 2021/230987 (the contents of which are hereby incorporated by reference in their entirety)). In some embodiments, the AAV capsid variant comprises an amino acid other than the wild-type, e.g., native, amino acid, at one, two, three, four, five, six, seven, eight, or all of positions T571, N572, N573, Q574, S575, S576, T577, T578, and/or A579, numbered according to SEQ ID NO: 138 or corresponding to equivalent positions in any other AAV serotype (e.g., AAV1, AAV2, AAV3, AAV3b, AAV4, AAV6, AAV7, AAV8, AAV9, AAVrh8, AAVrh10, AAVrh32.33, AAVrh74, SEQ ID NO: 139, PHP.N, PHP.B, or an AAV serotype as provided in Table 6 of WO 2021/230987 (the contents of which are hereby incorporated by reference in their entirety)). In some embodiments, the AAV capsid variant comprises an amino acid other than the wild-type, e.g., native, amino acid, at position T577, numbered according to SEQ ID NO: 138 or corresponding to equivalent positions in any other AAV serotype (e.g., AAV1, AAV2, AAV3, AAV3b, AAV4, AAV6, AAV7, AAV8, AAV9, AAVrh8, AAVrh10, AAVrh32.33, AAVrh74, SEQ ID NO: 139, PHP.N, PHP.B, or an AAV serotype as provided in Table 6 of WO 2021/230987 (the contents of which are hereby incorporated by reference in their entirety)). In some embodiments, the AAV capsid variant comprises a modification, e.g., substitution, at one, two, three, four, five, six, seven, eight, or all of positions T571, N572, N573, Q574, S575, S576, T577, T578, and/or A579, numbered according to SEQ ID NO: 138 or corresponding to equivalent positions in any other AAV serotype (e.g., AAV1, AAV2, AAV3, AAV3b, AAV4, AAV6, AAV7, AAV8, AAV9, AAVrh8, AAVrh10, AAVrh32.33, AAVrh74, SEQ ID NO: 139, PHP.N, PHP.B, or an AAV serotype as provided in Table 6 of WO 2021/230987 (the contents of which are hereby incorporated by reference in their entirety). In some embodiments, the AAV capsid variant comprises a modification, e.g., substitution, at position T577, numbered according to SEQ ID NO: 138 or corresponding to equivalent positions in any other AAV serotype (e.g., AAV1, AAV2, AAV3, AAV3b, AAV4, AAV6, AAV7, AAV8, AAV9, AAVrh8, AAVrh10, AAVrh32.33, AAVrh74, SEQ ID NO: 139, PHP.N, PHP.B, or an AAV serotype as provided in Table 6 of WO 2021/230987 (the contents of which are hereby incorporated by reference in their entirety).

[1214] In some embodiments, an AAV capsid variant described herein comprises the amino acid sequence of SEQ ID NO: 138 or an amino acid sequence substantially identical (e.g., having at least 70%, 75%, 80%, 85%, 90%, 92%, 95%, 97%, 98%, or 99% sequence identity) thereto. In some embodiments, an AAV capsid variant described herein comprises the amino acid sequence of SEQ ID NO: 138 or an amino acid sequence having at least 90% identity thereto. In some embodiments, an AAV capsid variant described herein comprises the amino acid sequence of SEQ ID NO: 138 or an amino acid sequence having at least 95% identity thereto. In some embodiments, an AAV capsid variant described herein comprises the amino acid sequence of SEQ ID NO: 138 or an amino acid sequence having at least 96% identity thereto. In some embodiments, an AAV capsid variant described herein comprises the amino acid sequence of SEQ ID NO: 138 or an amino acid sequence having at least 97% identity thereto. In some embodiments, an AAV capsid variant described herein comprises the amino acid sequence of SEQ ID NO: 138 or an amino acid sequence having at least 98% identity thereto. In some embodiments, an AAV capsid variant described herein comprises the amino acid sequence of SEQ ID NO: 138 or an amino acid sequence having at least 99% identity thereto. In some embodiments the AAV capsid polypeptide or the AAV capsid variant, comprises an amino acid sequence comprising at least one, two, or three modifications, e.g., substitutions (e.g., conservative substitutions), but no more than 30, 20, or 10 modifications, e.g., substitutions (e.g., conservative substitutions), relative to the amino acid sequence of SEQ ID NO: 138. In some embodiments the AAV capsid polypeptide or the AAV capsid variant, comprises an amino acid sequence comprising at least one, two, or three, but no more than 30, 20, or 10 different amino acids, relative to the amino acid sequence of SEQ ID NO: 138. In some embodiments, the AAV capsid polypeptide or the AAV capsid variant, comprises an amino acid sequence encoded by the nucleotide sequence of SEQ ID NO: 137 or a nucleotide sequence substantially identical (e.g., having at least 70%, 75%, 80%, 85%, 90%, 92%, 95%, 97%, 98%, or 99% sequence identity) thereto. In some embodiments, the nucleotide sequence encoding the AAV capsid polypeptide or the AAV capsid variant comprises the nucleotide sequence of SEQ ID NO: 137 or a nucleotide sequence substantially identical (e.g., having at least 70%, 75%, 80%, 85%, 90%, 92%, 95%, 97%, 98%, or 99% sequence identity) thereto.

[1215] In some embodiments, an AAV capsid variant described herein comprises the amino acid sequence or is encoded by the nucleotide sequence of any of SEQ ID NO: 1 or 2 of U.S. Pat. No. 7,427,396; SEQ ID NO: 114 of US20030138772; SEQ ID NO: 199 of US20150315612; or SEQ ID NOs: 13, 14, 16, 17, 19, 20, 22, 23, 25, 26, 28, 29, 31, 32, 34, 35, 37, 38, 40, 41, 43, or 44 of US20160289275A1 (the contents of each are incorporated herein by reference in their entirety), or a sequence substantially identical (e.g., having at least 70%, 75%, 80%, 85%, 90%, 92%, 95%, 97%, 98%, or 99% sequence identity) thereto.

[1216] In some embodiments, the AAV capsid variant described herein comprises a modification, e.g., substitution, at position 569 (e.g., M569V), 652 (e.g., D652A), 362 (e.g., T362M), 359 (e.g., Q359D), 350 (e.g., E350Q), 533 (e.g., P533S), 585 (e.g., Y585V), 587 (e.g., L587T), 581 (e.g., A581T), 582 (e.g., T582A), 584 (e.g., T584A), or a combination thereof, all numbered relative to SEQ ID NO: 138.

[1217] In some embodiments, an AAV capsid variant described herein comprises an amino acid from a wild-type AAV5 sequence, e.g., the amino acid sequence of SEQ ID NO: 138, at one or more of positions 581 to 589, numbered relative to SEQ ID NO: 138. In some embodiments, the AAV capsid variant comprises 1, 2, 3, 4, 5, 6, 7, 8, or all of: the amino acid from a wild-type AAV5 sequence (e.g., SEQ ID NO: 138) at position 581 (e.g., comprises the amino acid A at position 581); the amino acid from a wild-type AAV5 sequence (e.g., SEQ ID NO: 138) at position 582 (e.g., comprises the amino acid T at position 582); the amino acid from a wild-type AAV5 sequence (e.g., SEQ ID NO: 138) at position 583 (e.g., comprises the amino acid G at position 583); the amino acid from a wild-type AAV5 sequence (e.g., SEQ ID NO: 138) at position 584 (e.g., comprises the amino acid T at position 584); the amino acid from a wild-type AAV5 sequence (e.g., SEQ ID NO: 138) at position 585 (e.g., comprises the amino acid Y at position 585); the amino acid from a wild-type AAV5 sequence (e.g., SEQ ID NO: 138) at position 586 (e.g., comprises the amino acid N at position 586); the amino acid from a wild-type AAV5 sequence (e.g., SEQ ID NO: 138) at position 587 (e.g., comprises the amino acid L at position 587); the amino acid from a wild-type AAV5 sequence (e.g., SEQ ID NO: 138) at position 588 (e.g., comprises the amino acid Q at position 588); and/or the amino acid from a wild-type AAV5 sequence (e.g., SEQ ID NO: 138) at position 589 (e.g., comprises the amino acid E at position 589).

[1218] In certain embodiments, an AAV capsid described herein does not comprise a T at position 581, an A at position 582, an A at position 584, a V at position 585, a T at position 585, a V at position 569, an A at position 652, an M at position 362, a Q at position 359, a Q at position 350, an S at position 533, or a combination thereof, all numbered relative to SEQ ID NO: 138.

[1219] In some embodiments, an AAV capsid described herein does not comprise a modification, e.g., substitution, at positions 581-589 (numbered according to SEQ ID NO: 138), wherein the modification has the amino acid sequence of any of the sequences provided in Tables 2, 7, 8, 10, 12, 14, 16, 18, 20, 22, 24, 26, 28, 30, 32, 34, 36, 39, 41, 43, 45, 47, 49, 51, 53, 55, 57, 59, 61, 63, 65, 67, 69, or 71-86 of WO 2021/242909.

[1220] In any of the embodiments described herein, a position numbered relative to SEQ ID NO: 138 can be identified by providing an alignment of a reference sequence and a query sequence, wherein the reference sequence is SEQ ID NO: 138, and identifying the residues corresponding to the positions in the query sequence that correspond to positions in the reference sequence.

TABLE 6
AAV Sequences

| | SEQ | |
|---|---|---|
| | ID | |
| Serotype | NO: | Sequence |
| AAV5 | 138 | MSFVDHPPDWLEEVGEGLREFLGLEAGPPKPKPNQQHQDQARGLVLPGYNYLGPGNGLDR |
| WT | | GEPVNRADEVAREHDISYNEQLEAGDNPYLKYNHADAEFQEKLADDTSFGGNLGKAVFQA |
| (amino | | KKRVLEPFGLVEEGAKTAPTGKRIDDHFPKRKKARTEEDSKPSTSSDAEAGPSGSQQLQI |
| acid) | | PAQPASSLGADTMSAGGGGPLGDNNQGADGVGNASGDWHCDSTWMGDRVVTKSTRTWVLP |
| | | SYNNHQYREIKSGSVDGSNANAYFGYSTPWGYFDFNRFHSHWSPRDWQRLINNYWGFRPR |
| | | SLRVKIFNIQVKEVTVQDSTTTIANNLTSTVQVFTDDDYQLPYVVGNGTEGCLPAFPPQV |
| | | FTLPQYGYATLNRDNTENPTERSSFFCLEYFPSKMLRTGNNFEFTYNFEEVPFHSSFAPS |
| | | QNLFKLANPLVDQYLYRFVSTNNTGGVQFNKNLAGRYANTYKNWFPGPMGRTQGWNLGSG |
| | | VNRASVSAFATTNRMELEGASYQVPPQPNGMTNNLQGSNTYALENTMIFNSQPANPGTTA |
| | | TYLEGNMLITSESETQPVNRVAYNVGGQMATNNQSSTTAPATGTYNLQEIVPGSVWMERD |
| | | VYLQGPIWAKIPETGAHFHPSPAMGGFGLKHPPPMMLIKNTPVPGNITSFSDVPVSSFIT |
| | | QYSTGQVTVEMEWELKKENSKRWNPEIQYTNNYNDPQFVDFAPDSTGEYRTTRPIGTRYL |
| | | TRPL |
| AAV5 | 744 | TAPTGKRIDDHFPKRKKARTEEDSKPSTSSDAEAGPSGSQQLQIPAQPASSLGADTMSAG |
| WT VP2 | | GGGPLGDNNQGADGVGNASGDWHCDSTWMGDRVVTKSTRTWVLPSYNNHQYREIKSGSVD |
| (amino | | GSNANAYFGYSTPWGYFDFNRFHSHWSPRDWQRLINNYWGFRPRSLRVKIFNIQVKEVTV |
| acid; | | QDSTTTIANNLTSTVQVFTDDDYQLPYVVGNGTEGCLPAFPPQVFTLPQYGYATLNRDNT |
| positions | | ENPTERSSFFCLEYFPSKMLRTGNNFEFTYNFEEVPFHSSFAPSQNLFKLANPLVDQYLY |
| 137-724 | | RFVSTNNTGGVQFNKNLAGRYANTYKNWFPGPMGRTQGWNLGSGVNRASVSAFATTNRME |
| of SEQ ID | | LEGASYQVPPQPNGMTNNLQGSNTYALENTMIFNSQPANPGTTATYLEGNMLITSESETQ |
| NO: 138) | | PVNRVAYNVGGQMATNNQSSTTAPATGTYNLQEIVPGSVWMERDVYLQGPIWAKIPETGA |
| | | HFHPSPAMGGFGLKHPPPMMLIKNTPVPGNITSFSDVPVSSFITQYSTGQVTVEMEWELK |
| | | KENSKRWNPEIQYTNNYNDPQFVDFAPDSTGEYRTTRPIGTRYLTRPL |
| AAV5 | 750 | MSAGGGGPLGDNNQGADGVGNASGDWHCDSTWMGDRVVTKSTRTWVLPSYNNHQYREIKS |
| WT VP3 | | GSVDGSNANAYFGYSTPWGYFDFNRFHSHWSPRDWQRLINNYWGFRPRSLRVKIFNIQVK |
| (amino | | EVTVQDSTTTIANNLTSTVQVFTDDDYQLPYVVGNGTEGCLPAFPPQVFTLPQYGYATLN |
| acid; | | RDNTENPTERSSFFCLEYFPSKMLRTGNNFEFTYNFEEVPFHSSFAPSQNLFKLANPLVD |
| positions | | QYLYRFVSTNNTGGVQFNKNLAGRYANTYKNWFPGPMGRTQGWNLGSGVNRASVSAFATT |
| 193-724 | | NRMELEGASYQVPPQPNGMTNNLQGSNTYALENTMIFNSQPANPGTTATYLEGNMLITSE |
| of SEQ ID | | SETQPVNRVAYNVGGQMATNNQSSTTAPATGTYNLQEIVPGSVWMERDVYLQGPIWAKIP |
| NO: 138) | | ETGAHFHPSPAMGGFGLKHPPPMMLIKNTPVPGNITSFSDVPVSSFITQYSTGQVTVEME |
| | | WELKKENSKRWNPEIQYTNNYNDPQFVDFAPDSTGEYRTTRPIGTRYLTRPL |
| AAV5 | 137 | atgtcttttgttgatcaccctccagattggttggaagaagttggtgaaggtcttcgcgag |
| WT | | tttttgggccttgaagcgggcccaccgaaaccaaaacccaatcagcagcatcaagatcaa |
| (DNA) | | gcccgtggtcttgtgctgcctggttataactatctcggacccggaaacggtctcgatcga |
| | | ggagagcctgtcaacagggcagacgaggtcgcgcgagagcacgacatctcgtacaacgag |
| | | cagcttgaggcgggagacaacccctacctcaagtacaaccacgcggacgccgagtttcag |
| | | gagaagctcgccgacgacacatccttcgggggaaacctcggaaaggcagtctttcaggcc |
| | | aagaaaagggttctcgaaccttttggcctggttgaagagggtgctaagacggcccctacc |
| | | ggaaagcggatagacgaccactttccaaaaagaaagaaggctcggaccgaagaggactcc |
| | | aagccttccacctcgtcagacgccgaagctggacccagcggatcccagcagctgcaaatc |
| | | ccagcccaaccagcctcaagtttgggagctgatacaatgtctgcgggaggtggcggccca |
| | | ttgggcgacaataaccaaggtgccgatggagtgggcaatgcctcgggagattggcattgc |
| | | gattccacgtggatgggggacagagtcgtcaccaagtccacccgaacctgggtgctgccc |
| | | agctacaacaaccaccagtaccgagagatcaaaagcggctccgtcgacggaagcaacgcc |
| | | aacgcctactttggatacagcaccccctgggggtactttgactttaaccgcttccacagc |
| | | cactggagcccccgagactggcaaagactcatcaacaactactggggcttcagaccccgg |
| | | tccctcagagtcaaaatcttcaacattcaagtcaaagaggtcacggtgcaggactccacc |
| | | accaccatcgccaacaacctcacctccaccgtccaagtgtttacggacgacgactaccag |
| | | ctgccctacgtcgtcggcaacgggaccgagggatgcctgccggccttccctccgcaggtc |
| | | tttacgctgccgcagtacggttacgcgacgctgaaccgcgacaacacagaaaatcccacc |
| | | gagaggagcagcttcttctgcctagagtactttcccagcaagatgctgagaacgggcaac |
| | | aactttgagtttacctacaactttgaggaggtgcccttccactccagcttcgctcccagt |
| | | cagaacctgttcaagctggccaacccgctggtggaccagtacttgtaccgcttcgtgagc |
| | | acaaataacactggcggagtccagttcaacaagaacctggccgggagatacgccaacacc |
| | | tacaaaaactggttcccggggcccatgggccgaacccagggctggaacctgggctccggg |
| | | gtcaaccgcgccagtgtcagcgccttcgccacgaccaataggatggagctcgagggcgcg |
| | | agttaccaggtgcccccgcagccgaacggcatgaccaacaacctccagggcagcaacacc |
| | | tatgccctggagaacactatgatcttcaacagccagccggcgaacccgggcaccaccgcc |
| | | acgtacctcgagggcaacatgctcatcaccagcgagagcgagacgcagccggtgaaccgc |
| | | gtggcgtacaacgtcggcgggcagatggccaccaacaaccagagctcTACTACTGCCCCC |
| | | GCGACCGGCACGTACAACCTCCAGGAAATCGTGCCCGGCAGCGTGTGGATGGAGAGGGAC |
| | | GTGTACCTCCAAGGACCCATCTGGGCCAAGATCCCAGAGACGGGGGCGCACTTTCACCCC |
| | | TCTCCGGCCATGGGCGGATTCGGACTCAAACACCCACCGCCCATGATGCTCATCAAGAAC |
| | | ACGCCTGTGCCCGGAAATATCACCAGCTTCTCGGACGTGCCCGTCAGCAGCTTCATCACC |
| | | CAGTACAGCACCGGGCAGGTCACCGTGGAGATGGAGTGGGAGCTCAAGAAGGAAAACTCC |
| | | AAGAGGTGGAACCCAGAGATCCAGTACACAAACAACTACAACGACCCCCAGTTTGTGGAC |
| | | TTTGCCCCGGACAGCACCGGGGAATACAGAACCACCAGACCTATCGGAACCCGATACCTT |
| | | ACCCGACCCCTTTAA |
| AAV9/hu. | 139 | MAADGYLPDWLEDNLSEGIREWWALKPGAPQPKANQQHQDNARGLVLPGYKYLGPGNGLD |
| 14 WT | | KGEPVNAADAAALEHDKAYDQQLKAGDNPYLKYNHADAEFQERLKEDTSFGGNLGRAVFQ |
| (amino | | AKKRLLEPLGLVEEAAKTAPGKKRPVEQSPQEPDSSAGIGKSGAQPAKKRLNFGQTGDTE |
| acid) | | SVPDPQPIGEPPAAPSGVGSLTMASGGGAPVADNNEGADGVGSSSGNWHCDSQWLGDRVI |
| | | TTSTRTWALPTYNNHLYKQISNSTSGGSSNDNAYFGYSTPWGYFDFNRFHCHFSPRDWQR |
| | | LINNNWGFRPKRLNFKLFNIQVKEVTDNNGVKTIANNLTSTVQVFTDSDYQLPYVLGSAH |
| | | EGCLPPFPADVFMIPQYGYLTLNDGSQAVGRSSFYCLEYFPSQMLRTGNNFQFSYEFENV |
| | | PFHSSYAHSQSLDRLMNPLIDQYLYYLSKTINGSGQNQQTLKFSVAGPSNMAVQGRNYIP |
| | | GPSYRQQRVSTTVTQNNNSEFAWPGASSWALNGRNSLMNPGPAMASHKEGEDRFFPLSGS |
| | | LIFGKQGTGRDNVDADKVMITNEEEIKTTNPVATESYGQVATNHQSAQAQAQTGWVQNQG |
| | | ILPGMVWQDRDVYLQGPIWAKIPHTDGNFHPSPLMGGFGMKHPPPQILIKNTPVPADPPT |
| | | AFNKDKLNSFITQYSTGQVSVEIEWELQKENSKRWNPEIQYTSNYYKSNNVEFAVNTEGV |
| | | YSEPRPIGTRYLTRNL |

### Viral Genome of the AAV Particle

[1221] In some embodiments, an AAV particle as described herein comprising an AAV capsid variant described herein, may be used for the delivery of a viral genome to a tissue (e.g., CNS, heart, liver, and/or muscle). In some embodiments, an AAV particle comprising an AAV capsid variant described herein can be used for delivery of a viral genome to a tissue or cell, e.g., CNS, DRG, heart, liver, or muscle cell or tissue. In some embodiments, an AAV particle of the present disclosure is a recombinant AAV particle. In some embodiments, an AAV particle of the present disclosure is an isolated AAV particle.

[1222] The viral genome may encode any payload, such as but not limited to a polypeptide (e.g., a therapeutic polypeptide), an antibody, an enzyme, an RNAi agent and/or components of a gene editing system. In one embodiment, the AAV particles described herein are used to deliver a payload to cells of the CNS, after intravenous delivery. In another embodiment, the AAV particles described herein are used to deliver a payload to cells of the DRG, after intravenous delivery. In some embodiments, the AAV particles described herein are used to deliver a payload to cells of a heart, after intravenous delivery. In some embodiments, the AAV particles described herein are used to deliver a payload to cells of a muscle, e.g., a heart muscle, after intravenous delivery. In some embodiments, the AAV particles described herein are used to deliver a payload to cells of a liver after intravenous delivery.

[1223] In some embodiments, a viral genome of an AAV particle comprising an AAV capsid variant, as described herein, comprises a nucleotide sequence comprising a transgene encoding a payload. In some embodiments, the viral genome comprises an inverted terminal repeat sequence (ITR). In some embodiments, the viral genome comprises two ITR sequences, one at the 5′ end of the viral genome (e.g., 5′ relative to the encoded payload) and one at the 3′ end of the viral genome (e.g., 3′ relative to the encoded payload). In some embodiments, a viral genome of an AAV particle, e.g., an AAV particle comprising an AAV capsid variant described herein, may comprise a regulatory element (e.g., promoter), untranslated regions (UTR), a miR binding site, a polyadenylation sequence (polyA), a filler or stuffer sequence, an intron, and/or a linker sequence, e.g., for enhancing transgene expression.

[1224] In some embodiments, the viral genome components are selected and/or engineered for expression of the payload in a target tissue (e.g., CNS (e.g., brain, spinal cord, or both), heart, liver, and/or muscle tissue).

### Viral Genome Component: Inverted Terminal Repeats (ITRs)

[1225] In some embodiments, the AAV particle comprising an AAV capsid variant described herein comprises a viral genome comprising an ITR and a transgene encoding a payload. In some embodiments, the viral genome comprises two ITRs. In some embodiments, the two ITRs flank the nucleotide sequence encoding the payload at the 5′ and 3′ ends. In some embodiments, the ITRs function as origins of replication comprising recognition sites for replication. In some embodiments, the ITRs comprise sequence regions which can be complementary and symmetrically arranged. In some embodiments, the ITRs incorporated into viral genomes as described herein may be comprised of naturally occurring polynucleotide sequences or recombinantly derived polynucleotide sequences.

[1226] In some embodiments, the ITR may be from the same serotype as the capsid polypeptide, e.g., capsid variant, selected from any of the known serotypes, or a variant thereof. In some embodiments, the ITR may be of a different serotype than the capsid. In some embodiments, the viral genome comprises two ITR sequence regions, wherein the ITRs are of the same serotype as one another. In some embodiments, the viral genome comprises two ITR sequence regions, wherein the ITRs are of different serotypes. Non-limiting examples include zero, one, or both of the ITRs having the same serotype as the capsid. In some embodiments, both ITRs of the viral genome of the AAV particle are AAV2 ITRs.

[1227] Independently, each ITR may be about 100 to about 150 nucleotides in length. An ITR may be about 100-105 nucleotides in length, 106-110 nucleotides in length, 111-115 nucleotides in length, 116-120 nucleotides in length, 121-125 nucleotides in length, 126-130 nucleotides in length, 131-135 nucleotides in length, 136-140 nucleotides in length, 141-145 nucleotides in length or 146-150 nucleotides in length. In some embodiments, the ITRs are 140-142 nucleotides in length. Non-limiting examples of ITR length are 102, 105, 130, 140, 141, 142, 145 nucleotides in length.

### Viral Genome Component: Promoters

[1228] In some embodiments, viral genome of an AAV particle described herein comprises at least one element to enhance the payload target specificity and expression (See e.g., Powell et al. Viral Expression Cassette Elements to Enhance Transgene Target Specificity and Expression in Gene Therapy, 2015; the contents of which are herein incorporated by reference in their entirety). Non-limiting examples of elements to enhance payload target specificity and expression include promoters, endogenous miRNAs, post-transcriptional regulatory elements (PREs), polyadenylation (PolyA) signal sequences and upstream enhancers (USEs), CMV enhancers and introns.

[1229] In some embodiments, an AAV particle comprising an AAV capsid variant described herein comprises a viral genome comprising a nucleic acid comprising a transgene encoding a payload, wherein the transgene is operably linked to a promoter. In some embodiments, the promoter is a species-specific promoter, an inducible promoter, a tissue-specific promoter, or a cell cycle-specific promoter (e.g., a promoter as described in Parr et al., Nat. Med. 3:1145-9 (1997); the contents of which are herein incorporated by reference in their entirety).

[1230] In some embodiments, the promoter may be naturally occurring or non-naturally occurring. Non-limiting examples of promoters include those derived from viruses, plants, mammals, or humans. In some embodiments, the promoters may be those derived from human cells or systems. In some embodiments, the promoter may be truncated or mutated, e.g., a promoter variant.

[1231] In some embodiments, the promoter is a ubiquitous promoter, e.g., capable of expression in multiple tissues. In some embodiments the promoter is a human elongation factor 1α-subunit (EF1α) promoter, the cytomegalovirus (CMV) immediate-early enhancer and/or promoter, the chicken β-actin (CBA) promoter and its derivative CAG, β glucuronidase (GUSB) promoter, or ubiquitin C (UBC) promoter. In some embodiments, the promoter is a cell or tissue specific promoter, e.g., capable of expression in tissues or cells of the central or peripheral nervous systems, targeted regions within (e.g., frontal cortex), and/or sub-sets of cells therein (e.g., excitatory neurons). In some embodiments, the promoter is a cell-type specific promoters capable of expression of a payload in excitatory neurons (e.g., glutamatergic), inhibitory neurons (e.g., GABA-ergic), neurons of the sympathetic or parasympathetic nervous system, sensory neurons, neurons of the dorsal root ganglia, motor neurons, or supportive cells of the nervous systems such as microglia, glial cells, astrocytes, oligodendrocytes, and/or Schwann cells.

[1232] In some embodiments, the promoter is a liver specific promoter (e.g., hAAT, TBG), skeletal muscle specific promoter (e.g., desmin, MCK, C512), B cell promoter, monocyte promoter, leukocyte promoter, macrophage promoter, pancreatic acinar cell promoter, endothelial cell promoter, lung tissue promoter, and/or cardiac or cardiovascular promoter (e.g., aMHC, cTnT, and CMV-MLC2k).

[1233] In some embodiments, the promoter is a tissue-specific promoter for payload expression in a tissue or cell of the central nervous system. In some embodiments, the promoter is a synapsin (Syn) promoter, glutamate vesicular transporter (VGLUT) promoter, vesicular GABA transporter (VGAT) promoter, parvalbumin (PV) promoter, sodium channel Nav 1.8 promoter, tyrosine hydroxylase (TH) promoter, choline acetyltransferase (ChaT) promoter, methyl-CpG binding protein 2 (MeCP2) promoter, Ca²⁺/calmodulin-dependent protein kinase II (CaMKII) promoter, metabotropic glutamate receptor 2 (mGluR2) promoter, neurofilament light chain (NFL) or heavy chain (NFH) promoter, neuron-specific enolase (NSE) promoter, β-globin minigene nβ2 promoter, preproenkephalin (PPE) promoter, enkephalin (Enk) promoter, and excitatory amino acid transporter 2 (EAAT2) promoter, or a fragment thereof. In some embodiments, the promoter is a cell-type specific promoter capable of expression in an astrocyte, e.g., a glial fibrillary acidic protein (GFAP) promoter and a EAAT2 promoter, or a fragment thereof. In some embodiments, the promoter is a cell-type specific promoter capable of expression in an oligodendrocyte, e.g., a myelin basic protein (MBP) promoter or a fragment thereof.

[1234] In some embodiments, the promoter is a GFAP promoter. In some embodiments, the promoter is a synapsin (syn or syn1) promoter, or a fragment thereof.

[1235] In some embodiments, the promoter comprises an insulin promoter or a fragment thereof.

[1236] In some embodiments, the promoter of the viral genome described herein (e.g., comprised within an AAV particle comprising an AAV capsid variant described herein) comprises an EF-1a promoter or variant thereof, e.g., as provided in Table 40. In some embodiments, the EF-1a promoter comprises the nucleotide sequence of any one of SEQ ID NOs: 2100, 2101, 2103, 2104, 2108, 2109, 2111-2120, or any one of the nucleotide sequences provided in Table 8, a nucleotide sequence comprising at least one, two, three, four, five, six or seven but no more than ten modifications, e.g., substitutions, insertions, or deletions, relative to the nucleotide sequence of SEQ ID NOs: 2100, 2101, 2103, 2104, 2108, 2109, 2111-2120, or any one of the nucleotide sequences provided in Table 8, or a nucleotide sequence with at least 70% (e.g., 80, 85%, 90%, 95%, 96%, 97%, 98%, or 99%) sequence identity to any one of SEQ ID NOs: 2100, 2101, 2103, 2104, 2108, 2109, 2111-2120, or any one of the nucleotide sequences provided in Table 8.

TABLE 8
Exemplary Promoter Variants

| | | SEQ ID |
|---|---|---|
| Description | Sequences | NO: |
| EF1a Promoter | CGTGAGGCTCCGGTGCCCGTCAGTGGGCAGAGCGCACATCGCCCACAGTCCCCG | 2100 |
| (intron | AGAAGTTGGGGGGAGGGGTCGGCAATTGAACCGGTGCCTAGAGAAGGTGGCGCG | |
| underlined) | GGGTAAACTGGGAAAGTGATGTCGTGTACTGGCTCCGCCTTTTTCCCGAGGGTG | |
| | GGGGAGAACCGTATATAAGTGCAGTAGTCGCCGTGAACGTTCTTTTTCGCAACG | |
| | GGTTTGCCGCCAGAACACAGGTAAGTGCCGTGTGTGGTTCCCGCGGGCCTGGCC | |
| | TCTTTACGGGTTATGGCCCTTGCGTGCCTTGAATTACTTCCACCTGGCTGCAGT | |
| | ACGTGATTCTTGATCCCGAGCTTCGGGTTGGAAGTGGGTGGGAGAGTTCGAGGC | |
| | CTTGCGCTTAAGGAGCCCCTTCGCCTCGTGCTTGAGTTGAGGCCTGGCCTGGGC | |
| | GCTGGGGCCGCCGCGTGCGAATCTGGTGGCACCTTCGCGCCTGTCTCGCTGCTT | |
| | TCGATAAGTCTCTAGCCATTTAAAATTTTTGATGACCTGCTGCGACGCTTTTTT | |
| | TCTGGCAAGATAGTCTTGTAAATGCGGGCCAAGATCTGCACACTGGTATTTCGG | |
| | TTTTTGGGGCCGCGGGCGGCGACGGGGCCCGTGCGTCCCAGCGCACATGTTCGG | |
| | CGAGGCGGGGCCTGCGAGCGCGGCCACCGAGAATCGGACGGGGGTAGTCTCAAG | |
| | CTGGCCGGCCTGCTCTGGTGCCTGGCCTCGCGCCGCCGTGTATCGCCCCGCCCT | |
| | GGGCGGCAAGGCTGGCCCGGTCGGCACCAGTTGCGTGAGCGGAAAGATGGCCGC | |
| | TTCCCGGCCCTGCTGCAGGGAGCTCAAAATGGAGGACGCGGCGCTCGGGAGAGC | |
| | GGGCGGGTGAGTCACCCACACAAAGGAAAAGGGCCTTTCCGTCCTCAGCCGTCG | |
| | CTTCATGTGACTCCACGGAGTACCGGGCGCCGTCCAGGCACCTCGATTAGTTCT | |
| | CGAGCTTTTGGAGTACGTCGTCTTTAGGTTGGGGGGAGGGGTTTTATGCGATGG | |
| | AGTTTCCCCACACTGAGTGGGTGGAGACTGAAGTTAGGCCAGCTTGGCACTTGA | |
| | TGTAATTCTCCTTGGAATTTGCCCTTTTTGAGTTTGGATCTTGGTTCATTCTCA | |
| | AGCCTCAGACAGTGGTTCAAAGTTTTTTTCTTCCATTTCAGGTGTCGTGA | |
| miniEF1a | GCCCGTCAGTGGGCAGAGCGCACATCGCCCACAGTCCCCGAGAAGTTGGGGGGA | 2101 |
| | GGGGTCGGCAATTGAACCGGTGCCTAGAGAAGGTGGCGCGGGGTAAACTGGGAA | |
| | AGTGATGTCGTGTACTGGCTCCGCCTTTTTCCCGAGGGTGGGGGAGAACCGTAT | |
| | ATAAGTGCAGTAGTCGCCGTGAACGTTCTTTTTCGCAACGGGTTTGCCGCCAGA | |
| | ACACGCGTAAG | |
| Promoter | GCATG | |
| Variant 1 | | |
| Promoter | GGTGGAGAAGAGCATG | 2103 |
| Variant 2 | | |
| Promoter | GTCATCACTGAGGTGGAGAAGAGCATG | 2104 |
| Variant 3 | | |
| Promoter | CGTGAG | |
| Variant 4 | | |
| Promoter | GT | |
| Variant 5 | | |
| Promoter | GCTCCGGT | |
| Variant 6 | | |
| Promoter | GCCCGTCAGTGGGCAGAGCGCACATCGCCCACAGTCCCCGAGAAGTTGGGGGGA | 2108 |
| Variant 19 | GGGGTCGGCAATTGAACCGGTGCCTAGAGAAGGTGGCGCGGGGTAAACTGGGAA | |
| | AGTGATGTCGTGTACTGGCTCCGCCTTTTTCCCGAGGGTGGGGGAGAACCGTAT | |
| | ATAAGTGCAGTAGTCGCCGTGAACGTTCTTTTTCGCAACGGGTTTGCCGCCAGA | |
| | ACACAG | |
| Promoter | GCCCGTCAGTGGGCAGAGCGCACATCGCCCACAGTCCCCGAGAAGTTGGGGGGA | 2109 |
| Variant 20 | GGGGTCGGCAATTGAACCGGTGCCTAGAGAAGGTGGCGCGGGGTAAACTGGGAA | |
| | AGTGATGTCGTGTACTGGCTCCGCCTTTTTCCCGAGGGTGGGGGAGAACCGTAT | |
| | ATAAGTGCAGTAGTCGCCGTGAACGTTCTTTTTCGCAACGGGTTTGCCGCCAGA | |
| | ACACGC | |
| Promoter | GTAAG | |
| Variant 7 | | |
| Promoter | GTGCCCGTCAGTGGGCAGAGCGCACATCGCCCACAGTCCCCGAGAAGTTGGGGG | 2111 |
| Variant 8 | GAGGGGTCGGCAATTGAACCGGTGCCTAGAGAAGGTGGCGCGGGGTAAACTGGG | |
| | AAAGTGATGTCGTGTACTGGCTCCGCCTTTTTCCCGAGGGTGGGGGAGAACCGT | |
| | ATATAAGTGCAGTAGTCGCCGTGAACGTTCTTTTTCGCAACGGGTTTGCCGCCA | |
| | GAACACGCGTAAG | |
| Promoter | GCTCCGGTGCCCGTCAGTGGGCAGAGCGCACATCGCCCACAGTCCCCGAGAAGT | 2112 |
| Variant | TGGGGGGAGGGGTCGGCAATTGAACCGGTGCCTAGAGAAGGTGGCGCGGGGTAA | |
| 9 | ACTGGGAAAGTGATGTCGTGTACTGGCTCCGCCTTTTTCCCGAGGGTGGGGGAG | |
| | AACCGTATATAAGTGCAGTAGTCGCCGTGAACGTTCTTTTTCGCAACGGGTTTG | |
| | CCGCCAGAACACGCGTAAG | |
| Promoter | CGTGAGGCTCCGGTGCCCGTCAGTGGGCAGAGCGCACATCGCCCACAGTCCCCG | 2113 |
| Variant | AGAAGTTGGGGGGAGGGGTCGGCAATTGAACCGGTGCCTAGAGAAGGTGGCGCG | |
| 10 | GGGTAAACTGGGAAAGTGATGTCGTGTACTGGCTCCGCCTTTTTCCCGAGGGTG | |
| | GGGGAGAACCGTATATAAGTGCAGTAGTCGCCGTGAACGTTCTTTTTCGCAACG | |
| | GGTTTGCCGCCAGAACACGCGTAAG | |
| Promoter | CGTGAGGCTCCGGTGCCCGTCAGTGGGCAGAGCGCACATCGCCCACAGTCCCCG | 2114 |
| Variant 11 | AGAAGTTGGGGGGAGGGGTCGGCAATTGAACCGGTGCCTAGAGAAGGTGGCGCG | |
| | GGGTAAACTGGGAAAGTGATGTCGTGTACTGGCTCCGCCTTTTTCCCGAGGGTG | |
| | GGGGAGAACCGTATATAAGTGCAGTAGTCGCCGTGAACGTTCTTTTTCGCAACG | |
| | GGTTTGCCGCCAGAACACAG | |
| Promoter | GCATGCGTGAGGCTCCGGTGCCCGTCAGTGGGCAGAGCGCACATCGCCCACAGT | 2115 |
| Variant | CCCCGAGAAGTTGGGGGGAGGGGTCGGCAATTGAACCGGTGCCTAGAGAAGGTG | |
| 12 | GCGCGGGGTAAACTGGGAAAGTGATGTCGTGTACTGGCTCCGCCTTTTTCCCGA | |
| | GGGTGGGGGAGAACCGTATATAAGTGCAGTAGTCGCCGTGAACGTTCTTTTTCG | |
| | CAACGGGTTTGCCGCCAGAACACGCGTAAG | |
| Promoter | GCATGCGTGAGGCTCCGGTGCCCGTCAGTGGGCAGAGCGCACATCGCCCACAGT | 2116 |
| Variant 13 | CCCCGAGAAGTTGGGGGGAGGGGTCGGCAATTGAACCGGTGCCTAGAGAAGGTG | |
| | GCGCGGGGTAAACTGGGAAAGTGATGTCGTGTACTGGCTCCGCCTTTTTCCCGA | |
| | GGGTGGGGGAGAACCGTATATAAGTGCAGTAGTCGCCGTGAACGTTCTTTTTCG | |
| | CAACGGGTTTGCCGCCAGAACACAG | |
| Promoter | GGTGGAGAAGAGCATGCGTGAGGCTCCGGTGCCCGTCAGTGGGCAGAGCGCACA | 2117 |
| Variant | TCGCCCACAGTCCCCGAGAAGTTGGGGGGAGGGGTCGGCAATTGAACCGGTGCC | |
| 14 | TAGAGAAGGTGGCGCGGGGTAAACTGGGAAAGTGATGTCGTGTACTGGCTCCGC | |
| | CTTTTTCCCGAGGGTGGGGGAGAACCGTATATAAGTGCAGTAGTCGCCGTGAAC | |
| | GTTCTTTTTCGCAACGGGTTTGCCGCCAGAACACGCGTAAG | |
| Promoter | GGTGGAGAAGAGCATGCGTGAGGCTCCGGTGCCCGTCAGTGGGCAGAGCGCACA | 2118 |
| Variant | TCGCCCACAGTCCCCGAGAAGTTGGGGGGAGGGGTCGGCAATTGAACCGGTGCC | |
| 15 | TAGAGAAGGTGGCGCGGGGTAAACTGGGAAAGTGATGTCGTGTACTGGCTCCGC | |
| | CTTTTTCCCGAGGGTGGGGGAGAACCGTATATAAGTGCAGTAGTCGCCGTGAAC | |
| | GTTCTTTTTCGCAACGGGTTTGCCGCCAGAACACAG | |
| Promoter | GTCATCACTGAGGTGGAGAAGAGCATGCGTGAGGCTCCGGTGCCCGTCAGTGGG | 2119 |
| Variant 16 | CAGAGCGCACATCGCCCACAGTCCCCGAGAAGTTGGGGGGAGGGGTCGGCAATT | |
| | GAACCGGTGCCTAGAGAAGGTGGCGCGGGGTAAACTGGGAAAGTGATGTCGTGT | |
| | ACTGGCTCCGCCTTTTTCCCGAGGGTGGGGGAGAACCGTATATAAGTGCAGTAG | |
| | TCGCCGTGAACGTTCTTTTTCGCAACGGGTTTGCCGCCAGAACACGCGTAAG | |
| Promoter | GTCATCACTGAGGTGGAGAAGAGCATGCGTGAGGCTCCGGTGCCCGTCAGTGGG | 2120 |
| Variant 18 | CAGAGCGCACATCGCCCACAGTCCCCGAGAAGTTGGGGGGAGGGGTCGGCAATT | |
| | GAACCGGTGCCTAGAGAAGGTGGCGCGGGGTAAACTGGGAAAGTGATGTCGTGT | |
| | ACTGGCTCCGCCTTTTTCCCGAGGGTGGGGGAGAACCGTATATAAGTGCAGTAG | |
| | TCGCCGTGAACGTTCTTTTTCGCAACGGGTTTGCCGCCAGAACACAG | |

### Viral Genome Component: Untranslated Regions (UTRs)

[1237] In some embodiments, wild type untranslated regions (UTRs) of a gene are transcribed but not translated. Generally, the 5′ UTR starts at the transcription start site and ends at the start codon and the 3′ UTR starts immediately following the stop codon and continues until the termination signal for transcription.

[1238] Features typically found in abundantly expressed genes of specific target organs (e.g., CNS tissue, muscle, or DRG) may be engineered into UTRs to enhance stability and protein production. As a non-limiting example, a 5′ UTR from mRNA normally expressed in the brain (e.g., huntingtin) may be used in the viral genomes of the AAV particles described herein to enhance expression in neuronal cells or other cells of the central nervous system.

[1239] While not wishing to be bound by theory, wild-type 5′ untranslated regions (UTRs) include features which play roles in translation initiation. Kozak sequences, which are commonly known to be involved in the process by which the ribosome initiates translation of many genes, are usually included in 5′ UTRs. Kozak sequences have the consensus CCR (A/G) CCAUGG, where R is a purine (adenine or guanine) three bases upstream of the start codon (ATG), which is followed by another ‘G’.

[1240] In one embodiment, the 5′UTR in the viral genome includes a Kozak sequence.

[1241] In one embodiment, the 5′UTR in the viral genome does not include a Kozak sequence.

[1242] While not wishing to be bound by theory, wild-type 3′ UTRs are known to have stretches of Adenosines and Uridines embedded therein. These AU rich signatures are particularly prevalent in genes with high rates of turnover. Based on their sequence features and functional properties, the AU rich elements (AREs) can be separated into three classes (Chen et al, 1995, the contents of which are herein incorporated by reference in its entirety): Class I AREs, such as, but not limited to, c-Myc and MyoD, contain several dispersed copies of an AUUUA motif within U-rich regions. Class II AREs, such as, but not limited to, GM-CSF and TNF-α, possess two or more overlapping UUAUUUA (U/A) (U/A) nonamers. Class III ARES, such as, but not limited to, c-Jun and Myogenin, are less well defined. These U rich regions do not contain an AUUUA motif. Most proteins binding to the AREs are known to destabilize the messenger, whereas members of the ELAV family, most notably HuR, have been documented to increase the stability of mRNA. HuR binds to AREs of all the three classes. Engineering the HuR specific binding sites into the 3′ UTR of nucleic acid molecules will lead to HuR binding and thus, stabilization of the message in vivo.

[1243] Introduction, removal or modification of 3′ UTR AU rich elements (AREs) can be used to modulate the stability of a polynucleotide. When engineering specific polynucleotides, e.g., payload regions of viral genomes, one or more copies of an ARE can be introduced to make polynucleotides less stable and thereby curtail translation and decrease production of the resultant protein. Likewise, AREs can be identified and removed or mutated to increase the intracellular stability and thus increase translation and production of the resultant protein.

[1244] In one embodiment, the 3′ UTR of the viral genome may include an oligo (dT) sequence for templated addition of a poly-A tail.

[1245] In one embodiment, the viral genome may include at least one miRNA seed, binding site or full sequence. microRNAs (or miRNA or miR) are 19-25 nucleotide noncoding RNAs that bind to the sites of nucleic acid targets and down-regulate gene expression either by reducing nucleic acid molecule stability or by inhibiting translation. In some embodiments, a microRNA sequence comprises a seed region, e.g., a sequence in the region of positions 2-8 of the mature microRNA, which has Watson-Crick sequence fully or partially complementarity to the miRNA target sequence of the nucleic acid.

[1246] In one embodiment, the viral genome may be engineered to include, alter or remove at least one miRNA binding site, full sequence or seed region.

[1247] Any UTR from any gene known in the art may be incorporated into the viral genome of the AAV particle. These UTRs, or portions thereof, may be placed in the same orientation as in the gene from which they were selected or they may be altered in orientation or location. In one embodiment, the UTR used in the viral genome of the AAV particle may be inverted, shortened, lengthened, made with one or more other 5′ UTRs or 3′ UTRs known in the art. As used herein, the term “altered” as it relates to a UTR, means that the UTR has been changed in some way in relation to a reference sequence. For example, a 3′ or 5′ UTR may be altered relative to a wild type or native UTR by the change in orientation or location as taught above or may be altered by the inclusion of additional nucleotides, deletion of nucleotides, swapping or transposition of nucleotides.

[1248] In one embodiment, the viral genome of the AAV particle comprises at least one artificial UTR which is not a variant of a wild type UTR.

[1249] In one embodiment, the viral genome of the AAV particle comprises UTRs which have been selected from a family of transcripts whose proteins share a common function, structure, feature or property.

### Viral Genome Component: Polyadenylation Sequence

[1250] The viral genome of the AAV particle described herein (e.g., an AAV particle comprising an AAV capsid variant, described herein) may comprise a polyadenylation sequence. In some embodiments, the viral genome of the AAV particle (e.g., an AAV particle comprising an AAV capsid variant, described herein) comprises a polyadenylation sequence between the 3′ end of the nucleotide sequence encoding the payload and the 5′ end of the 3′ITR.

### Viral Genome Component: Introns

[1251] In some embodiments, the viral genome of the AAV particle as described herein (e.g., an AAV particle comprising an AAV capsid variant), comprises an element to enhance the payload target specificity and expression (See e.g., Powell et al. Viral Expression Cassette Elements to Enhance Transgene Target Specificity and Expression in Gene Therapy, Discov. Med, 2015, 19 (102): 49-57; the contents of which are herein incorporated by reference in their entirety), such as an intron. Non-limiting examples of introns include, MVM (67-97 bps), F.IX truncated intron 1 (300 bps), β-globin SD/immunoglobulin heavy chain splice acceptor (250 bps), adenovirus splice donor/immunoglobin splice acceptor (500 bps), SV40 late splice donor/splice acceptor (19S/16S) (180 bps) and hybrid adenovirus splice donor/IgG splice acceptor (230 bps).

Viral Genome Component: Stuffer sequences

[1252] In some embodiments, the viral genome of an AAV particle described herein comprises an element to improve packaging efficiency and expression, such as a stuffer or filler sequence. Non-limiting examples of stuffer sequences include albumin and/or alpha-1 antitrypsin. Any known viral, mammalian, or plant sequence may be manipulated for use as a stuffer sequence.

[1253] In some embodiments, the stuffer or filler sequence may be from about 100-3500 nucleotides in length. The stuffer sequence may have a length of about 100, 200, 300, 400, 500, 600, 700, 800, 900, 1000, 1100, 1200, 1300, 1400, 1500, 1600, 1700, 1800, 1900, 2000, 2100, 2200, 2300, 2400, 2500, 2600, 2700, 2800, 2900, or 3000 nucleotides.

Viral Genome Component: miRNA

[1254] In some embodiments, the viral genome comprises a sequence encoding a miRNA to reduce the expression of the payload in a tissue or cell, e.g., the DRG (dorsal root ganglion), or neurons of other ganglia, such as those of the sympathetic or parasympathetic nervous system. In some embodiments, a miRNA, e.g., a miR183, a miR182, and/or miR96, may be encoded in the viral genome to modulate, e.g., reduce the expression, of the viral genome in a DRG neuron. As another non-limiting example, a miR-122 miRNA may be encoded in the viral genome to modulate, e.g., reduce, the expression of the viral genome in the liver. In some embodiments, a miRNA, e.g., a miR-142-3p, may be encoded in the viral genome to modulate, e.g., reduce, the expression, of the viral genome in a cell or tissue of the hematopoietic lineage, including for example immune cells (e.g., antigen presenting cells or APC, including dendritic cells (DCs), macrophages, and B-lymphocytes). In some embodiments, a miRNA, e.g., a miR-1, may be encoded in the viral genome to modulate, e.g., reduce, the expression, of the viral genome in a cell or tissue of the heart.

### Viral Genome Component: miR Binding Site

[1255] Tissue- or cell-specific expression of the AAV viral particles disclosed herein can be enhanced by introducing tissue- or cell-specific regulatory sequences, e.g., promoters, enhancers, microRNA binding sites, e.g., a detargeting site. Without wishing to be bound by theory, it is believed that an encoded miR binding site can modulate, e.g., prevent, suppress, or otherwise inhibit, the expression of a gene of interest on the viral genome disclosed herein, based on the expression of the corresponding endogenous microRNA (miRNA) or a corresponding controlled exogenous miRNA in a tissue or cell, e.g., a non-targeting cell or tissue. In some embodiments, a miR binding site modulates, e.g., reduces, expression of the payload encoded by a viral genome of an AAV particle described herein in a cell or tissue where the corresponding mRNA is expressed.

[1256] In some embodiments, the viral genome of an AAV particle described herein comprises a nucleotide sequence encoding a microRNA binding site, e.g., a detargeting site. In some embodiments, the viral genome of an AAV particle described herein comprises a nucleotide sequence encoding a miR binding site, a microRNA binding site series (miR BSs), or a reverse complement thereof.

[1257] In some embodiments, the nucleotide sequence encoding the miR binding site series or the miR binding site is located in the 3′-UTR region of the viral genome (e.g., 3′ relative to the nucleotide sequence encoding a payload), e.g., before the poly A sequence, 5′-UTR region of the viral genome (e.g., 5′ relative to the nucleotide sequence encoding a payload), or both.

[1258] In some embodiments, the encoded miR binding site series comprise at least 1-5 copies, e.g., at least 1-3, 2-4, 3-5, 1, 2, 3, 4, 5 or more copies of a miR binding site (miR BS). In some embodiments, all copies are identical, e.g., comprise the same miR binding site. In some embodiments, the miR binding sites within the encoded miR binding site series are continuous and not separated by a spacer. In some embodiments, the miR binding sites within an encoded miR binding site series are separated by a spacer, e.g., a non-coding sequence. In some embodiments, the spacer is about 1 to 6 nucleotides or about 5 to 10 nucleotides, e.g., about 7-8 nucleotides, nucleotides in length. In some embodiments, the spacer coding sequence or reverse complement thereof comprises one or more of (i) GGAT; (ii) CACGTG; (iii) GCATGC, or a repeat of one or more of (i)-(iii). In some embodiments, the spacer comprises the nucleotide sequence of GATAGTTA, or a nucleotide sequence having at least one, two, or three modifications, e.g., substitutions (e.g., conservative substitutions), insertions, or deletions, but no more than four modifications, e.g., substitutions (e.g., conservative substitutions), insertions, or deletions relative to the nucleotide sequence of GATAGTTA.

[1259] In some embodiments, the encoded miR binding site series comprise at least 1-5 copies, e.g., at least 1-3, 2-4, 3-5, 1, 2, 3, 4, 5 or more copies of a miR binding site (miR BS). In some embodiments, at least 1, 2, 3, 4, 5, or all of the copies are different, e.g., comprise a different miR binding site. In some embodiments, the miR binding sites within the encoded miR binding site series are continuous and not separated by a spacer. In some embodiments, the miR binding sites within an encoded miR binding site series are separated by a spacer, e.g., a non-coding sequence. In some embodiments, the spacer is about 1 to 6 nucleotides or about 5 to 10 nucleotides, e.g., about 7-8 nucleotides, in length. In some embodiments, the spacer comprises one or more of (i) GGAT; (ii) CACGTG; (iii) GCATGC, or a repeat of one or more of (i)-(iii). In some embodiments, the spacer comprises the nucleotide sequence of GATAGTTA, or a nucleotide sequence having at least one, two, or three modifications, e.g., substitutions (e.g., conservative substitutions), insertions, but no more than four modifications, e.g., substitutions (e.g., conservative substitutions), insertions, or deletions relative to the nucleotide sequence of GATAGTTA.

[1260] In some embodiments, the encoded miR binding site is substantially identical (e.g., at least 70%, 75%, 80%, 85%, 90%, 95%, 99% or 100% identical), to the miR in the host cell. In some embodiments, the encoded miR binding site comprises at least 1, 2, 3, 4, or 5 mismatches or no more than 6, 7, 8, 9, or 10 mismatches to a miR in the host cell. In some embodiments, the mismatched nucleotides are contiguous. In some embodiments, the mismatched nucleotides are non-contiguous. In some embodiments, the mismatched nucleotides occur outside the seed region-binding sequence of the miR binding site, such as at one or both ends of the miR binding site. In some embodiments, the miR binding site is 100% identical to the miR in the host cell.

[1261] In some embodiments, the nucleotide sequence encoding the miR binding site is substantially complementary (e.g., at least 70%, 75%, 80%, 85%, 90%, 95%, 99% or 100% complementary), to the miR in the host cell. In some embodiments, to complementary sequence of the nucleotide sequence encoding the miR binding site comprises at least 1, 2, 3, 4, or 5 mismatches or no more than 6, 7, 8, 9, or 10 mismatches to a miR in the host cell. In some embodiments, the mismatched nucleotides are contiguous. In some embodiments, the mismatched nucleotides are non-contiguous. In some embodiments, the mismatched nucleotides occur outside the seed region-binding sequence of the miR binding site, such as at one or both ends of the miR binding site. In some embodiments, the encoded miR binding site is 100% complementary to the miR in the host cell.

[1262] In some embodiments, an encoded miR binding site or sequence region is at least about 10 to about 125 nucleotides in length, e.g., at least about 10 to 50 nucleotides, 10 to 100 nucleotides, 50 to 100 nucleotides, 50 to 125 nucleotides, or 100 to 125 nucleotides in length. In some embodiments, an encoded miR binding site or sequence region is at least about 7 to about 28 nucleotides in length, e.g., at least about 8-28 nucleotides, 7-28 nucleotides, 8-18 nucleotides, 12-28 nucleotides, 20-26 nucleotides, 22 nucleotides, 24 nucleotides, or 26 nucleotides in length, and optionally comprises at least one consecutive region (e.g., 7 or 8 nucleotides) complementary (e.g., fully or partially complementary) to the seed sequence of a miRNA (e.g., a miR122, a miR142, a miR183, or a miR1).

[1263] In some embodiments, the encoded miR binding site is complementary (e.g., fully or partially complementary) to a miR expressed in liver or hepatocytes, such as miR122. In some embodiments, the encoded miR binding site or encoded miR binding site series comprises a miR122 binding site sequence. In some embodiments, the encoded miR122 binding site comprises the nucleotide sequence of ACAAACACCATTGTCACACTCCA (SEQ ID NO: 4673), or a nucleotide sequence having at least 50%, 55%, 60%, 65%, 70%, 75%, 80%, 85%, 90%, at least 95%, at least 99%, or 100% sequence identity, or comprising at least one, two, three, four, five, six, or seven modifications, e.g., substitutions, insertions, or deletions, but no more than ten modifications, e.g., insertions, deletions, or substitutions, relative to the nucleotide sequence of SEQ ID NO: 4673, e.g., wherein the modification can result in a mismatch between the encoded miR binding site and the corresponding miRNA. In some embodiments, the viral genome comprises at least 2, 3, 4, or 5 copies of the encoded miR122 binding site, e.g., an encoded miR122 binding site series, optionally wherein the encoded miR122 binding site series comprises the nucleotide sequence of: ACAAACACCATTGTCACACTCCACACAAACACCATTGTCACACTCCACACAAACACCATTGTCACACT CCA (SEQ ID NO: 4674), or a nucleotide sequence having at least 50%, 55%, 60%, 65%, 70%, 75%, 80%, 85%, 90%, at least 95%, at least 99%, or 100% sequence identity, or comprising at least one, two, three, four, five, six, or seven modifications, e.g., substitutions, insertions, or deletions, but no more than ten modifications, e.g., substitutions, insertions, or deletions, relative to the nucleotide sequence of SEQ ID NO: 4674, e.g., wherein the modification can result in a mismatch between the encoded miR binding site and the corresponding miRNA. In some embodiments, at least two of the encoded miR122 binding sites are connected directly, e.g., without a spacer. In other embodiments, at least two of the encoded miR122 binding sites are separated by a spacer, e.g., 1, 2, 3, 4, 5, 6, 7, 8, 9, or 10 nucleotides in length, which is located between two or more consecutive encoded miR122 binding site sequences. In embodiments, the spacer is about 1 to 6 nucleotides or about 5 to 10 nucleotides, e.g., about 7-8, in length. In some embodiments, the spacer coding sequence or reverse complement thereof comprises one or more of (i) GGAT; (ii) CACGTG; (iii) GCATGC, or a repeat of one or more of (i)-(iii). In some embodiments, an encoded miR binding site series comprises at least 3-5 copies (e.g., 4 copies) of a miR122 binding site, with or without a spacer, wherein the spacer is about 1 to 6 nucleotides or about 5 to 10 nucleotides, e.g., about 7-8 nucleotides or about 8 nucleotides, in length. In some embodiments, the spacer comprises the nucleotide sequence of GATAGTTA, or a nucleotide sequence comprising one, two, or three modifications, e.g., substitutions, insertions, or deletions, but no more than four modifications, e.g., substitutions, insertions, or deletions relative to the nucleotide sequence of GATAGTTA.

[1264] In some embodiments, the encoded miR binding site is complementary (e.g., fully or partially complementary) to a miR expressed in the heart. In embodiments, the encoded miR binding site or encoded miR binding site series comprises a miR-1 binding site. In some embodiments, the encoded miR-1 binding site comprises the nucleotide sequence of ATACATACTTCTTTACATTCCA (SEQ ID NO: 4679), a nucleotide sequence having at least 50%, 55%, 60%, 65%, 70%, 75%, 80%, 85%, 90%, at least 95%, at least 99%, or 100% sequence identity, or having at least one, two, three, four, five, six, or seven modifications, e.g., substitutions (e.g., conservative substitutions), insertions, or deletions, but no more than ten modifications, e.g., substitutions (e.g., conservative substitutions), insertions, or deletions, relative to the nucleotide sequence of SEQ ID NO: 4679, e.g., wherein the modification can result in a mismatch between the encoded miR binding site and the corresponding miRNA. In some embodiments, the viral genome comprises at least 2, 3, 4, or 5 copies of the encoded miR-1 binding site, e.g., an encoded miR-1 binding site series. In some embodiments, the at least 2, 3, 4, or 5 copies (e.g., 2 or 3 copies) of the encoded miR-1 binding site are continuous (e.g., not separated by a spacer) or separated by a spacer. In some embodiments, the spacer is about 1 to 6 nucleotides or about 5 to 10 nucleotides, e.g., about 7-8 nucleotides or about 8 nucleotides, in length. In some embodiments, the spacer sequence comprises one or more of (i) GGAT; (ii) CACGTG; (iii) GCATGC, or a repeat of one or more of (i)-(iii). In some embodiments, the spacer comprises the nucleotide sequence of GATAGTTA, or a nucleotide sequence comprising one, two, or three modifications, e.g., substitutions, insertions, or deletions, but no more than four modifications, e.g., substitutions, insertions, or deletions, relative to the nucleotide sequence of GATAGTTA.

[1265] In some embodiments, the encoded miR binding site is complementary (e.g., fully or partially complementary) to a miR expressed in hematopoietic lineage, including immune cells (e.g., antigen presenting cells or APC, including dendritic cells (DCs), macrophages, and B-lymphocytes). In some embodiments, the encoded miR binding site complementary to a miR expressed in hematopoietic lineage comprises a nucleotide sequence disclosed, e.g., in US 2018/0066279, the contents of which are incorporated by reference herein in its entirety.

[1266] In embodiments, the encoded miR binding site or encoded miR binding site series comprises a miR-142-3p binding site sequence. In some embodiments, the encoded miR-142-3p binding site comprises the nucleotide sequence of TCCATAAAGTAGGAAACACTACA (SEQ ID NO: 4675), a nucleotide sequence having at least 50%, 55%, 60%, 65%, 70%, 75%, 80%, 85%, 90%, at least 95%, at least 99%, or 100% sequence identity, or comprising at least one, two, three, four, five, six, or seven modifications, e.g., substitutions, insertions, or deletions, but no more than ten modifications, e.g., substitutions, insertions, or deletions, relative to the nucleotide sequence of SEQ ID NO: 4675, e.g., wherein the modification can result in a mismatch between the encoded miR binding site and the corresponding miRNA. In some embodiments, the viral genome comprises at least 2, 3, 4, or 5 copies of the encoded miR-142-3p binding site, e.g., an encoded miR-142-3p binding site series. In some embodiments, the at least 2, 3, 4, or 5 copies (e.g., 2 or 3 copies) of the encoded miR-142-3p binding site are continuous (e.g., not separated by a spacer) or separated by a spacer. In some embodiments, the spacer is about 1 to 6 nucleotides or about 5 to 10 nucleotides, e.g., about 7-8 nucleotides or about 8 nucleotides, in length. In some embodiments, the spacer sequence comprises one or more of (i) GGAT; (ii) CACGTG; (iii) GCATGC, or a repeat of one or more of (i)-(iii). In some embodiments, the spacer comprises the nucleotide sequence of GATAGTTA, or a nucleotide sequence comprising one, two, or three modifications, e.g., substitutions, insertions, or deletions, but no more than four modifications, e.g., substitutions, insertions, or deletions, relative to the nucleotide sequence of GATAGTTA.

[1267] In some embodiments, the encoded miR binding site is complementary (e.g., fully complementary or partially complementary) to a miR expressed in a DRG (dorsal root ganglion) neuron, e.g., a miR183, a miR182, and/or miR96 binding site. In some embodiments, the encoded miR binding site is complementary to a miR expressed in expressed in a DRG neuron comprises a nucleotide sequence disclosed, e.g., in WO2020/132455, the contents of which are incorporated by reference herein in its entirety.

[1268] In some embodiments, the encoded miR binding site or encoded miR binding site series comprises a miR183 binding site sequence. In some embodiments, the encoded miR183 binding site comprises the nucleotide sequence of AGTGAATTCTACCAGTGCCATA (SEQ ID NO: 4676), or a nucleotide sequence having at least 50%, 55%, 60%, 65%, 70%, 75%, 80%, 85%, 90%, at least 95%, at least 99%, or 100% sequence identity, or comprising at least one, two, three, four, five, six, or seven modifications, e.g., substitutions, insertions, or deletions, but no more than ten modifications, e.g., substitutions (e.g., conservative substitutions), insertions, or deletions, relative to the nucleotide sequence of SEQ ID NO: 4676, e.g., wherein the modification can result in a mismatch between the encoded miR binding site and the corresponding miRNA. In some embodiments, the sequence complementary to the seed sequence corresponds to the double underlined of the encoded miR-183 binding site sequence. In some embodiments, the viral genome comprises at least comprises at least 2, 3, 4, or 5 copies (e.g., at least 2 or 3 copies) of the encoded miR183 binding site, e.g., an encoded miR183 binding site. In some embodiments, the at least 2, 3, 4, or 5 copies (e.g., 2 or 3 copies) of the encoded miR183 binding site are continuous (e.g., not separated by a spacer) or separated by a spacer. In some embodiments, the spacer is about 1 to 6 nucleotides or about 5 to 10 nucleotides, e.g., about 7-8 nucleotides or about 8 nucleotides, in length. In some embodiments, the spacer comprises the nucleotide sequence of GATAGTTA, or a nucleotide sequence comprising one, two, or three modifications, e.g., substitutions, insertions, or deletions, but no more than four modifications, e.g., substitutions, insertions, or deletions, relative to the nucleotide sequence of GATAGTTA. In some embodiments, the spacer sequence comprises one or more of (i) GGAT; (ii) CACGTG; (iii) GCATGC, or a repeat of one or more of (i)-(iii).

[1269] In some embodiments, the encoded miR binding site or the encoded miR binding site series comprises a miR182 binding site sequence. In some embodiments, the encoded miR182 binding site comprises, the nucleotide sequence of AGTGTGAGTTCTACCATTGCCAAA (SEQ ID NO: 4677), a sequence having at least 50%, 55%, 60%, 65%, 70%, 75%, 80%, 85%, 90%, at least 95%, at least 99%, or 100% sequence identity, or comprising at least one, two, three, four, five, six, or seven modifications, e.g., substitutions, insertions, or deletions, but no more than ten modifications, e.g., substitutions, insertions, or deletions, relative to the nucleotide sequence of SEQ ID NO: 4677, e.g., wherein the modification can result in a mismatch between the encoded miR binding site and the corresponding miRNA. In some embodiments, the viral genome comprises at least 2, 3, 4, or 5 copies of the encoded miR182 binding site, e.g., an encoded miR182 binding site series. In some embodiments, the at least 2, 3, 4, or 5 copies (e.g., 2 or 3 copies) of the encoded miR182 binding site are continuous (e.g., not separated by a spacer) or separated by a spacer. In some embodiments, the spacer is about 1 to 6 nucleotides or about 5 to 10 nucleotides, e.g., about 7-8 nucleotides or about 8 nucleotides, in length. In some embodiments, the spacer comprises the nucleotide sequence of GATAGTTA, or a nucleotide sequence comprising one, two, or three modifications, e.g., substitutions, insertions, or deletions, but no more than four modifications, e.g., substitutions, insertions, or deletions, relative to the nucleotide sequence of GATAGTTA. In some embodiments, the spacer sequence comprises one or more of (i) GGAT; (ii) CACGTG; (iii) GCATGC, or a repeat of one or more of (i)-(iii).

[1270] In certain embodiments, the encoded miR binding site or the encoded miR binding site series comprises a miR96 binding site sequence. In some embodiments, the encoded miR96 binding site comprises the nucleotide sequence of AGCAAAAATGTGCTAGTGCCAAA (SEQ ID NO: 4678), a sequence having at least 50%, 55%, 60%, 65%, 70%, 75%, 80%, 85%, 90%, at least 95%, at least 99%, or 100% sequence identity, or comprising at least one, two, three, four, five, six, or seven modifications, e.g., substitutions, insertions, or deletions, but no more than ten modifications, e.g., substitutions, insertions, or deletions, relative to the nucleotide sequence of SEQ ID NO: 4678, e.g., wherein the modification can result in a mismatch between the encoded miR binding site and the corresponding miRNA. In some embodiments, the viral genome comprises at least 2, 3, 4, or 5 copies of the encoded miR96 binding site, e.g., an encoded miR96 binding site series. In some embodiments, the at least 2, 3, 4, or 5 copies (e.g., 2 or 3 copies) of the encoded miR96 binding site are continuous (e.g., not separated by a spacer) or separated by a spacer. In some embodiments, the spacer is about 1 to 6 nucleotides or about 5 to 10 nucleotides, e.g., about 7-8 nucleotides or about 8 nucleotides, in length. In some embodiments, the spacer comprises the nucleotide sequence of GATAGTTA, or a nucleotide sequence comprising one, two, or three modifications, e.g., substitutions, insertions, or deletions, but no more than four modifications, e.g., substitutions, insertions, or deletions, relative to the nucleotide sequence of GATAGTTA. In some embodiments, the spacer sequence comprises one or more of (i) GGAT; (ii) CACGTG; (iii) GCATGC, or a repeat of one or more of (i)-(iii).

[1271] In some embodiments, the encoded miR binding site series comprises a miR122 binding site, a miR-1, a miR142 binding site, a miR183 binding site, a miR182 binding site, a miR 96 binding site, or a combination thereof. In some embodiments, the encoded miR binding site series comprises at least 2, 3, 4, or 5 copies of a miR122 binding site, a miR142 binding site, a miR183 binding site, a miR182 binding site, a miR 96 binding site, or a combination thereof. In some embodiments, at least two of the encoded miR binding sites are connected directly, e.g., without a spacer. In other embodiments, at least two of the encoded miR binding sites are separated by a spacer, e.g., 1, 2, 3, 4, 5, 6, 7, 8, 9, or 10 nucleotides in length, which is located between two or more consecutive encoded miR binding site sequences. In embodiments, the spacer is at least about 5 to 10 nucleotides, e.g., about 7-8 nucleotides or about 8 nucleotides, in length. In some embodiments, the spacer coding sequence or reverse complement thereof comprises one or more of (i) GGAT; (ii) CACGTG; (iii) GCATGC, or a repeat of one or more of (i)-(iii). In some embodiments, the spacer comprises the nucleotide sequence of GATAGTTA, or a nucleotide sequence comprising one, two, or three modifications, e.g., substitutions, insertions, or deletions, but no more than four modifications, e.g., substitutions, insertions, or deletions, relative to the nucleotide sequence of GATAGTTA.

[1272] In some embodiments, an encoded miR binding site series comprises at least 2-5 copies (e.g., 2 or 3 copies) of a combination of at least two, three, four, five, or all of a miR-1, miR122 binding site, a miR142 binding site, a miR183 binding site, a miR182 binding site, a miR96 binding site, wherein each of the miR binding sites within the series are continuous (e.g., not separated by a spacer) or are separated by a spacer. In some embodiments, the spacer is about 1 to 6 nucleotides or about 5 to 10 nucleotides, e.g., about 7-8 nucleotides or about 8 nucleotides, in length. In some embodiments, the spacer sequence comprises one or more of (i) GGAT; (ii) CACGTG; (iii) GCATGC, or a repeat of one or more of (i)-(iii). In some embodiments, the spacer comprises the nucleotide sequence of GATAGTTA, or a nucleotide sequence comprising at least one, two, or three modifications, e.g., substitutions, insertions, or deletions, but no more than four modifications, e.g., substitutions, insertions, or deletions, relative to the nucleotide sequence of GATAGTTA.

[1273] In some embodiments, an encoded miR binding site series comprises at least 2-5 copies (e.g., 2 or 3 copies) of a combination of a miR-122 binding site and a miR-1 binding site, wherein each of the miR binding sites within the series are continuous (e.g., not separated by a spacer) or are separated by a spacer. In some embodiments, the spacer is about 1 to 6 nucleotides or about 5 to 10 nucleotides, e.g., about 7-8 nucleotides or about 8 nucleotides, in length. In some embodiments, the spacer sequence comprises one or more of (i) GGAT; (ii) CACGTG; (iii) GCATGC, or a repeat of one or more of (i)-(iii). In some embodiments, the spacer comprises the nucleotide sequence of GATAGTTA, or a nucleotide sequence comprising one, two, or three modifications, e.g., substitutions, insertions, or deletions, but no more than four modifications, e.g., substitutions, insertions, or deletions, relative to the nucleotide sequence of GATAGTTA.

### Genome Size

[1274] In one embodiment, the AAV particle described herein (e.g., an AAV particle comprising an AAV capsid variant), may comprise a single-stranded or double-stranded viral genome. The size of the viral genome may be small, medium, large or the maximum size. As described above, the viral genome may comprise a promoter and a poly A tail.

[1275] In one embodiment, the viral genome may be a small single stranded viral genome. A small single stranded viral genome may be 2.1 to 3.5 kb in size such as, but not limited to, about 2.1, 2.2, 2.3, 2.4, 2.5, 2.6, 2.7, 2.8, 2.9, 3.0, 3.1, 3.2, 3.3, 3.4, and 3.5 kb in size.

[1276] In one embodiment, the viral genome may be a small double stranded viral genome. A small double stranded viral genome may be 1.3 to 1.7 kb in size such as, but not limited to, about 1.3, 1.4, 1.5, 1.6, and 1.7 kb in size.

[1277] In one embodiment, the viral genome may be a medium single stranded viral genome. A medium single stranded viral genome may be 3.6 to 4.3 kb in size such as, but not limited to, about 3.6, 3.7, 3.8, 3.9, 4.0, 4.1, 4.2 and 4.3 kb in size.

[1278] In one embodiment, the viral genome may be a medium double stranded viral genome. A medium double stranded viral genome may be 1.8 to 2.1 kb in size such as, but not limited to, about 1.8, 1.9, 2.0, and 2.1 kb in size.

[1279] In one embodiment, the viral genome may be a large single stranded viral genome. A large single stranded viral genome may be 4.4 to 6.0 kb in size such as, but not limited to, about 4.4, 4.5, 4.6, 4.7, 4.8, 4.9, 5.0, 5.1, 5.2, 5.3, 5.4, 5.5, 5.6, 5.7, 5.8, 5.9 and 6.0 kb in size.

[1280] In one embodiment, the viral genome may be a large double stranded viral genome. A large double stranded viral genome may be 2.2 to 3.0 kb in size such as, but not limited to, about 2.2, 2.3, 2.4, 2.5, 2.6, 2.7, 2.8, 2.9 and 3.0 kb in size.

### Payloads

[1281] In some embodiments, an AAV particle of the present disclosure (e.g., an AAV particle comprising an AAV capsid variant described herein) comprises a viral genome comprising a nucleic acid encoding a payload. In some embodiments, the encoded payload is an RNAi agent or a polypeptide. A payload of the present disclosure may be, but is not limited to, a peptide, a polypeptide, a protein, an antibody, an RNAi agent, etc.

[1282] In some embodiments, the nucleotide sequence encoding a payload may comprise a combination of coding and non-coding nucleic acid sequences. In some embodiments, the nucleotide sequence encoding the payload may encode a coding or non-coding RNA.

[1283] In some embodiments, the AAV particles described herein, e.g., an AAV particle comprising an AAV capsid variant, comprises a nucleic acid encoding a payload. In some embodiments, the encoded payload comprises a therapeutic protein, an antibody, an enzyme, one or more components of a genome editing system, and/or an RNAi agent (e.g., a dsRNA, siRNA, shRNA, pre-miRNA, pri-miRNA, miRNA, stRNA, lncRNA, piRNA, or snoRNA). In some embodiments, the encoded payload modulates, e.g., increases or decreases, the presence, level, and/or activity of a gene, mRNA, protein, or a combination thereof, e.g., in a cell or a tissue.

### Polypeptides

[1284] In some embodiments, the encoded payload of the AAV particle comprising an AAV capsid polypeptide, e.g., an AAV capsid variant, described herein comprises a polypeptide, protein, or peptide, e.g., a polypeptide, protein, or peptide described herein. The nucleic acid encoding the payload, may encode a product of any known gene and/or a recombinant version thereof. In some embodiments, the nucleic acid encoding the payload may encode at least one allele of apolipoprotein E (APOE) such as, but not limited to ApoE2, ApoE3 and/or ApoE4. In one embodiment, the nucleic acid encoding the payload encodes ApoE2 (cys112, cys158) protein or a fragment or variant thereof. In one embodiment, the nucleic acid encoding the payload encodes an ApoE3 (cys112, arg158) protein or fragment or variant thereof. In one embodiment, the nucleic acid encoding the pay load encodes ApoE4 (arg112, arg158). As another non-limiting example, the encoded payload comprises an aromatic L-amin acid decarboxylase (AADC) protein. As another non-limiting example, the encoded payload comprises an antibody, or a fragment thereof. As another non-limiting example, the encoded payload comprises a human survival of motor neuron (SMN) 1 or SMN2 protein, or fragments or variants thereof. As another non-limiting example, the encoded payload region comprises a glucocerebrosidase (GBA1) protein, or a fragment or variant thereof. As another non-limiting example, the encoded payload comprises a granulin precursor or progranulin (GRN) protein, or a fragment or variant thereof. As another non-limiting example, the encoded pay load comprises an aspartoacylase (ASPA) protein, or a fragment or variant thereof. As another non-limiting example, the encoded payload comprises a tripeptidyl peptidase I (CLN2) protein, or a fragment or variant thereof. As another non-limiting example, the encoded payload comprises a beta-galactosidase (GLB1) protein, or a fragment or variant thereof. As another non-limiting example, the encoded payload comprises a N-sulphoglucosamine sulphohydrolase (SGSH) protein, or a fragment or variant thereof. As another non-limiting example, the encoded payload comprises an N-acetyl-alpha-glucosaminidase (NAGLU) protein, or a fragment or variant thereof. As another non-limiting example, the encoded payload comprises an iduronate 2-sulfatase (IDS) protein, or a fragment or variant thereof. As another non-limiting example, the encoded payload comprises an intracellular cholesterol transporter (NPC1) protein, or a fragment or variant thereof. As another non-limiting example, the encoded payload comprises a gigaxonin (GAN) protein, or a fragment or variant thereof. The AAV viral genomes encoding polypeptides described herein may be useful in the fields of human disease, viruses, infections veterinary applications and a variety of in vivo and in vitro settings.

[1285] Amino acid sequences of a payload polypeptide encoded by a viral genome described herein, may be translated as a whole polypeptide, a plurality of polypeptides or fragments of polypeptides, which independently may be encoded by one or more nucleic acids, fragments of nucleic acids or variants of any of the aforementioned.

### Antibodies and Antibody Binding Fragments

[1286] In some embodiments, the encoded payload of AAV particle comprising an AAV capsid variant described herein comprises an antibody or antibody binding fragment. In some embodiments, the antibody may be a full antibody, a fragment, or any functional variant thereof. As non-limiting examples, an antibody may be a native antibody (e.g., with two heavy and two light chains), a heavy chain variable region, a light chain variable region, a heavy chain constant region, a light chain constant region, Fab, Fab′, F(ab′)₂, Fv, or scFv fragments, a diabody, a linear antibody, a single-chain antibody, a multi-specific antibody, an intrabody, one or more heavy chain complementarity determining regions (CDR), one or more light chain CDRs, a bi-specific antibody, a monoclonal antibody, a polyclonal antibody, a humanized antibody, an antibody mimetic, an antibody variant, a miniaturized antibody, a unibody, a maxibody, and/or a chimeric antigen receptor. The encoded antibody or antibody binding fragment may be useful in the treatment of a neurological disease, a neurodegenerative disorder, a muscular disease, a neuromuscular disorder, a neuro-oncological disorder, or any disorder associated with the central and/or peripheral nervous systems.

[1287] In some embodiments, the viral genome of the AAV particle (e.g., an AAV particle comprising an AAV capsid variant described herein) may comprise a nucleic acid which has been engineered to enable or enhance the expression of an antibody, or antibody binding fragment thereof.

[1288] In some embodiments, the encoded antibody of the payload of an AAV particle comprising an AAV capsid variant, described herein comprises at least one immunoglobulin variable domain sequence. An antibody may include, for example, full-length, mature antibodies and antigen-binding fragments of an antibody. For example, an antibody can include a heavy (H) chain variable domain sequence (VH), and a light (L) chain variable domain sequence (VL). In another example, an antibody includes two heavy (H) chain variable domain sequences and two light (L) chain variable domain sequence, thereby forming two antigen binding sites, such as Fab, Fab′, F(ab′)₂, Fc, Fd, Fd′, Fv, single chain antibodies (scFv for example), single variable domain antibodies, diabodies (Dab) (bivalent and bispecific), and chimeric (e.g., humanized) antibodies, which may be produced by the modification of whole antibodies or those synthesized de novo using recombinant DNA technologies. These functional antibody fragments, e.g., an antibody binding fragments, retain the ability to selectively bind with their respective antigen or receptor.

[1289] In some embodiments, the antibody binding fragment comprises at least one portion of an intact antibody, or recombinant variants thereof, and refers to the antigen binding domain, for example, an antigenic determining variable region of an intact antibody, that is sufficient to confer recognition and specific binding of the antibody fragment to a target, such as an antigen. Examples of antigen binding fragments include: (i) a Fab fragment, a monovalent fragment consisting of the VL, VH, CL and CHI domains; (ii) a F(ab′)₂ fragment, a bivalent fragment comprising two Fab fragments linked by a disulfide bridge at the hinge region; (iii) a Fd fragment consisting of the VH and CHI domains; (iv) a Fv fragment consisting of the VL and VH domains of a single arm of an antibody, (v) a diabody (dAb) fragment, which consists of a VH domain; (vi) a camelid or camelized variable domain; (vii) a single chain Fv (scFv), see e.g., Bird et al. (1988) Science 242:423-426; and Huston et al. (1988) Proc. Natl. Acad. Sci. USA 85:5879-5883); and (viii) a single domain antibody. These antibody fragments are obtained using conventional techniques known to those with skill in the art, and the fragments are screened for utility in the same manner as are intact antibodies. An antibody fragment can also be incorporated into single domain antibodies, maxibodies, minibodies, nanobodies, intrabodies, diabodies, triabodies, tetrabodies, v-NAR and bis-scFv (see, for example, Hollinger and Hudson, Nature Biotechnology 23:1126-1136, 2005).

[1290] In some embodiments, the encoded antibody of the payload of an AAV particle described herein comprises a multispecific antibody, e.g., it comprises a plurality of immunoglobulin variable domains sequences, wherein a first immunoglobulin variable domain sequence of the plurality has binding specificity for a first epitope and a second immunoglobulin variable domain sequence of the plurality has binding specificity for a second epitope. In some embodiments, the first and second epitopes are on the same antigen, e.g., the same protein (or subunit of a multimeric protein). In some embodiments, the first and second epitopes overlap. In some embodiments, the first and second epitopes do not overlap. In some embodiments, the first and second epitopes are on different antigens, e.g., the different proteins (or different subunits of a multimeric protein). In some embodiments, a multispecific antibody comprises a third, fourth or fifth immunoglobulin variable domain. In some embodiments, a multispecific antibody is a bispecific antibody, a trispecific antibody, or tetraspecific antibody.

[1291] In some embodiments, an encoded multispecific antibody of the payload of an AAV particle described herein is an encoded bispecific antibody. A bispecific antibody has specificity for no more than two antigens. A bispecific antibody is characterized by a first immunoglobulin variable domain sequence which has binding specificity for a first epitope and a second immunoglobulin variable domain sequence that has binding specificity for a second epitope. In some embodiments, the first and second epitopes are on the same antigen, e.g., the same protein (or subunit of a multimeric protein). In some embodiments, the first and second epitopes overlap. In some embodiments, the first and second epitopes do not overlap. In some embodiments, the first and second epitopes are on different antigens, e.g., the different proteins (or different subunits of a multimeric protein).

[1292] An antibody or an antibody binding fragment encoded by a viral genome of an AAV particle described herein, may be, but is not limited to, an antibody or antibody fragment that binds to B-amyloid, APOE, tau, SOD1, TDP-43, huntingtin, and/or synuclein. In some embodiments, the encoded payload comprises an antibody or antibody fragment that binds to a neuro-oncology related target, e.g., HER2, EGFR (e.g., EGFRvIII). In some embodiments, the encoded payload comprises an antibody that binds to HER2/neu. In some embodiments, the encoded payload comprises an antibody that binds to B-amyloid. In some embodiments, the encoded payload comprises an antibody that binds to tau.

### Gene Editing System

[1293] In some embodiments, the encoded payload of AAV particle comprising an AAV capsid variant described herein comprises a gene editing system or one or more components thereof. In some embodiments, the gene editing system comprises nucleic acid sequences that encode proteins having enzymatic activity to (i) selectively induce double or single stranded breaks in a DNA or RNA sequence, or (ii) substitute, insert or delete a particular base or set of bases of a DNA or RNA sequence in the absence of a double or single stranded break in the DNA or RNA. In some embodiments, the gene editing system includes, but is not limited to a CRISPR-Cas system (including different Cas or Cas-related nucleases), a Zinc finger nuclease, a meganuclease, a TALEN or a base editors. In some embodiments, the gene editing system comprises a chromosomal integration of a transgene, e.g., introduced by a parvovirus vector in the absence of an exogenous nuclease or an enzymatic entity.

### RNAi Agents

[1294] In some embodiments, the encoded payload of AAV particle comprising an AAV capsid variant described herein comprises an RNAi agent, e.g., an RNAi agent described herein. In some embodiments, the encoded payload of a viral genome of an AAV particle comprising an AAV capsid variant described herein comprises an RNAi agent, the RNAi, such as but not limited to, a dsRNA, a siRNA, a shRNA, a pre-miRNA, a pri-miRNA, a miRNA, a stRNA, a lncRNA, a piRNA, or a snoRNA. In some embodiments, the encoded payload comprises an RNAi agent for inhibiting expression of a SOD1, MAPT, APOE, HTT, C9ORF72, TDP-43, APP, BACE, SNCA, ATXNI, ATXN3, ATXN7, SCNIA-SCN5A, or SCN8A-SCN11A gene, protein, and/or mRNA. In some embodiments, the RNAi agent encoded by a viral genome described herein inhibits SOD1, MAPT, APOE, HTT, C9ORF72, TDP-43, APP, BACE, SNCA, ATXNI, ATXN3, ATXN7, SCNIA-SCN5A, or SCN8A-SCN11A.

[1295] An AAV particle comprising an AAV capsid variant described herein may comprise a viral genome encoding an RNAi agent, which targets the mRNA of a gene to modulate, e.g., interfere with gene expression and/or protein production.

[1296] In some embodiments, the RNAi agent may target a gene at the location of a single-nucleotide polymorphism (SNP) or variant within the nucleotide sequence of the gene.

[1297] The RNAi agent may be an siRNA duplex, wherein the siRNA duplex contains an antisense strand (guide strand) and a sense strand (passenger strand) hybridized together forming a duplex structure, wherein the antisense strand is complementary to the nucleic acid sequence of the targeted gene, and wherein the sense strand is homologous to the nucleic acid sequence of the targeted gene. In some aspects, the 5′end of the antisense strand has a 5′ phosphate group and the 3′end of the sense strand contains a 3′hydroxyl group. In other aspects, there are none, one or 2 nucleotide overhangs at the 3′end of each strand.

[1298] Each strand of an siRNA duplex targeting a gene of interest may be about 19 to 25, 19 to 24 or 19 to 21 nucleotides in length, preferably about 19 nucleotides, 20 nucleotides, 21 nucleotides, 22 nucleotides, 23 nucleotides, 24 nucleotides, or 25 nucleotides in length.

[1299] In one embodiment, an siRNA or dsRNA includes at least two sequences that are complementary to each other. The dsRNA includes a sense strand having a first sequence and an antisense strand having a second sequence. The antisense strand includes a nucleotide sequence that is substantially complementary to at least part of an mRNA encoding the target gene, and the region of complementarity is 30 nucleotides or less, and at least 15 nucleotides in length. Generally, the dsRNA is 19 to 25, 19 to 24 or 19 to 21 nucleotides in length. In some embodiments, the dsRNA is from about 15 to about 25 nucleotides in length, and in other embodiments the dsRNA is from about 25 to about 30 nucleotides in length. In some embodiments, the dsRNA is about 15 nucleotides in length, 16 nucleotides in length, 17 nucleotides in length, 18 nucleotides in length, 19 nucleotides, 20 nucleotides, 21 nucleotides, 22 nucleotides, 23 nucleotides, 24 nucleotides, 25 nucleotides in length, 26 nucleotides in length, 27 nucleotides in length, 28 nucleotides in length, 29 nucleotides in length, or 30 nucleotides in length.

[1300] In some embodiments, the encoded RNAi agent is an siRNA.

[1301] In some embodiments, the RNAi agent, e.g., an RNAi agent described herein inhibits the expression of the gene, mRNA, and/or protein by at least 10%, at least 20%, at least 25%, at least 30%, at least 35% or at least 40% or more, such as when assayed by a method known in the art. In some embodiments, the RNAi agent inhibits expression of a gene, mRNA, and protein by 50-100%, e.g., by 30%, 40%, 50%, 60%, 70%, 80%, 85%, 90%, 95% and 100%.

[1302] In some embodiments, the AAV particle described herein, comprising a viral genome encoding an RNAi agent targeting a gene of interest is administered to a subject in need for treating and/or ameliorating a disease, e.g., a neurological disorder of any disease associated with the central or peripheral nervous systems.

Design of siRNA

[1303] An AAV particle described herein (e.g., an AAV particle comprising an AAV capsid variant described herein) may comprise a viral genome encoding a siRNA molecule (e.g., siRNA duplex or encoded dsRNA) that target a gene of interest and suppress target gene expression, mRNA expression, and protein production. In some aspects, the siRNA molecules are designed and used to knock out target gene variants in cells, e.g., transcripts that are identified in neurological disease. In some aspects, the siRNA molecules are designed and used to knock down target gene variants in cells.

[1304] Some guidelines for designing siRNAs (for insertion into a viral genome of the AAV particles described herein) have been proposed in the art. These guidelines generally recommend generating a 19-nucleotide duplexed region, symmetric 2-3 nucleotide 3′ overhangs, 5-phosphate and 3-hydroxyl groups targeting a region in the gene to be silenced. Other rules that may govern siRNA sequence preference include, but are not limited to, (i) A/U at the 5′ end of the antisense strand; (ii) G/C at the 5′ end of the sense strand; (iii) at least five A/U residues in the 5′ terminal one-third of the antisense strand; and (iv) the absence of any GC stretch of more than 9 nucleotides in length. In accordance with such considerations, together with the specific sequence of a target gene, highly effective siRNA molecules essential for suppressing mammalian target gene expression may be readily designed.

[1305] In one embodiment, the sense and/or antisense strand is designed based on the method and rules outlined in European Patent Publication No. EP1752536, the contents of which are herein incorporated by reference in their entirety. As a non-limiting example, the 3′-terminal base of the sequence is adenine, thymine or uracil. As a non-limiting example, the 5′-terminal base of the sequence is guanine or cytosine. As a non-limiting example, the 3′-terminal sequence comprises seven bases rich in one or more bases of adenine, thymine and uracil.

[1306] In one embodiment, an siRNA molecule comprises a sense strand and a complementary antisense strand in which both strands are hybridized together to form a duplex structure. The antisense strand has sufficient complementarity to the target mRNA sequence to direct target-specific RNAi, e.g., the siRNA molecule has a sequence sufficient to trigger the destruction of the target mRNA by the RNAi machinery or process.

[1307] In some embodiments, the antisense strand and target mRNA sequences have 100% complementarity. The antisense strand may be complementary to any part of the target mRNA sequence. Neither the identity of the sense sequence nor the homology of the antisense sequence need be 100% complementary to the target.

[1308] In other embodiments, the antisense strand and target mRNA sequences comprise at least one mismatch. As a non-limiting example, the antisense strand and the target mRNA sequence have at least 50-90%, 50-95%, 50-99%, 60-70%, 60-80%, 60-90%, 60-95%, 60-99%, 70-80%, 70-90%, 70-95%, 70-99%, 80-90%, 80-95%, 80-99%, 90-95%, 90-99% or 95-99% complementary.

[1309] The siRNA molecule may have a length from about 10-50 or more nucleotides, e.g., each strand comprising 10-50 nucleotides (or nucleotide analogs). Preferably, the siRNA molecule has a length from about 15-30, e.g., 15, 16, 17, 18, 19, 20, 21, 22, 23, 24, 25, 26, 27, 28, 29, or 30 nucleotides in each strand, wherein one of the strands is sufficiently complementary to a target region. In one embodiment, the siRNA molecule has a length from about 19 to 25, 19 to 24 or 19 to 21 nucleotides.

[1310] In some embodiments, the siRNA molecule can be a synthetic RNA duplex comprising about 19 nucleotides to about 25 nucleotides, and two overhanging nucleotides at the 3′-end.

[1311] The siRNA molecule may comprise an antisense sequence and a sense sequence, or a fragment or variant thereof. As a non-limiting example, the antisense sequence and the sense sequence have at least 50-90%, 50-95%, 50-99%, 60-70%, 60-80%, 60-90%, 60-95%, 60-99%, 70-80%, 70-90%, 70-95%, 70-99%, 80-90%, 80-95%, 80-99%, 90-95%, 90-99% or 95-99% complementary.

[1312] The sense and antisense sequences may be completely complementary across a substantial portion of their length. In other embodiments, the sense sequence and antisense sequence may be at least 70, 80, 90, 95 or 99% complementary across independently at least 50, 60, 70, 80, 85, 90, 95, or 99% of the length of the strands.

[1313] In some embodiments, the sense and antisense strands of a siRNA duplex are linked by a short spacer sequence leading to the expression of a stem-loop structure termed short hairpin RNA (shRNA). The hairpin is recognized and cleaved by Dicer, thus generating mature siRNA molecules.

[1314] In some embodiments, the siRNA molecules, as well as associated spacer and/or flanking regions once designed, can be encoded by the viral genome of the AAV particles described herein, for delivery to a cell.

### Molecular Scaffold

[1315] In some embodiments, the siRNA molecules may be encoded in a modulatory polynucleotide which also comprises a molecular scaffold.

[1316] In some embodiments, the modulatory polynucleotide which comprises the payload (e.g., siRNA, miRNA or other RNAi agent described herein) includes a molecular scaffold which comprises a 5′ flanking sequence, a loop region, and/or a 3′ flanking region. In some embodiments a 5′ or 3′ flanking region may be of any length and may a wild type microRNA sequence or a portion thereof, or may be completely artificial. A 3′ flanking sequence may mirror the 5′ flanking sequence in size and origin. Either flanking sequence may be absent. In one embodiment, both the 5′ and 3′ flanking sequences are absent. The 3′ flanking sequence may optionally contain one or more CNNC motifs, where “N” represents any nucleotide. In some embodiments, the loop comprises at least one UGUG motif. In some embodiments, the UGUG motif is located at the 5′ terminus of the loop. In some embodiments the 5′ and 3′ flanking sequences are the same sequence. In some embodiments they differ by 2%, 3%, 4%, 5%, 10%, 20% or more than 30% when aligned to each other.

[1317] In some embodiments, modulatory polynucleotide comprises a stem loop structure. In some embodiments, the modulatory polynucleotide comprises in 5′ to 3′ order: a 5′ flanking sequence, a guide strand sequence, a loop region, a passenger strand sequence, and a 3′ flanking sequence. In some embodiments, the modulatory polynucleotide comprises in 5′ to 3′ order: a 5′ flanking sequence, a passenger strand sequence, a loop region, a guide strand sequence, and a 3′ flanking sequence.

[1318] In one embodiment, the molecular scaffold comprises a dual-function targeting modulatory polynucleotide. In one embodiment, the molecular scaffold may comprise one or more linkers known in the art. The linkers may separate regions or one molecular scaffold from another. As a non-limiting example, the molecular scaffold may be polycistronic.

[1319] In one embodiment, the modulatory polynucleotide is designed using at least one of the following properties: loop variant, seed mismatch/bulge/wobble variant, stem mismatch, loop variant and basal stem mismatch variant, seed mismatch and basal stem mismatch variant, stem mismatch and basal stem mismatch variant, seed wobble and basal stem wobble variant, or a stem sequence variant.

### AAV Production

[1320] Viral production disclosed herein describes processes and methods for producing AAV particles (with enhanced, improved and/or increased tropism for a target tissue), e.g., an AAV particle comprising an AAV capsid variant that may be used to contact a target cell to deliver a payload.

[1321] In some embodiments, disclosed herein is a method of making AAV particle of the present disclosure, e.g., an AAV particle comprising an AAV capsid variant the method comprising: (i) providing a host cell comprising a viral genome described herein and (ii) incubating the host cell under conditions suitable to enclose the viral genome in an AAV capsid variant, e.g., an AAV capsid variant described herein (e.g., an AAV capsid variant listed in Tables 3, 4, or 5), thereby making the AAV particle. In some embodiments, the method comprises prior to step (i), introducing a first nucleic acid comprising the viral genome into a cell. In some embodiments, the host cell comprises a second nucleic acid encoding the AAV capsid variant. In some embodiments, the second nucleic acid is introduced into the host cell prior to, concurrently with, or after the first nucleic acid molecule. In some embodiments, the AAV particle described herein is an isolated AAV particle. In some embodiments, the AAV particle described herein is a recombinant AAV particle.

[1322] Any method known in the art may be used for the preparation of AAV particles. In some embodiments, AAV particles are produced in mammalian cells (e.g., HEK293). In another embodiment, AAV particles are produced in insect cells (e.g., Sf9).

[1323] Methods of making AAV particles are well known in the art and are described in e.g., U.S. Pat. Nos. 6,204,059, 5,756,283, 6,258,595, 6,261,551, 6,270,996, 6,281,010, 6,365,394, 6,475,769, 6,482,634, 6,485,966, 6,943,019, 6,953,690, 7,022,519, 7,238,526, 7,291,498 and 7,491,508, 5,064,764, 6,194,191, 6,566,118, 8,137,948; or International Publication Nos. WO1996039530, WO1998010088, WO1999014354, WO1999015685, WO1999047691, WO2000055342, WO2000075353 and WO2001023597; Methods In Molecular Biology, ed. Richard, Humana Press, NJ (1995); O'Reilly et al., Baculovirus Expression Vectors, A Laboratory Manual, Oxford Univ. Press (1994); Samulski et al., J. Vir. 63:3822-8 (1989); Kajigaya et al., Proc. Nat'l. Acad. Sci. USA 88:4646-50 (1991); Ruffing et al., J. Vir. 66:6922-30 (1992); Kimbauer et al., Vir., 219:37-44 (1996); Zhao et al., Vir. 272:382-93 (2000); the contents of each of which are herein incorporated by reference in their entirety. In some embodiments, the AAV particles are made using the methods described in International Patent Publication WO2015191508, the contents of which are herein incorporated by reference in their entirety.

### Therapeutic Applications

[1324] The present disclosure provides a method for treating a disease, disorder and/or condition in a subject, including a human subject, comprising administering to the subject an AAV particle described herein, e.g., an AAV particle comprising an AAV capsid variant (e.g., an AAV capsid variant described herein), or administering to the subject any of the described compositions, including a pharmaceutical composition, described herein.

[1325] In some embodiments, an AAV particle of the present disclosure (e.g., an AAV particle comprising an AAV capsid variant described herein, e.g., an AAV5 capsid variant) is administered to a subject prophylactically, to prevent on-set of disease. In another embodiment, the AAV particle (e.g., an AAV particle comprising an AAV capsid variant) of the present disclosure are administered to treat (e.g., lessen the effects of) a disease or symptoms thereof. In yet another embodiment, the AAV particle of the present disclosure (e.g., an AAV particle comprising an AAV capsid variant) is administered to cure (eliminate) a disease. In another embodiment, the AAV particle (e.g., an AAV particle comprising an AAV capsid variant) of the present disclosure are administered to prevent or slow progression of disease. In yet another embodiment, the AAV particle (e.g., an AAV particle comprising an AAV capsid variant) of the present disclosure are used to reverse the deleterious effects of a disease. Disease status and/or progression may be determined or monitored by standard methods known in the art.

[1326] In some embodiments, the AAV particle of the disclosure (e.g., an AAV particle comprising an AAV capsid variant) is useful for treatment, prophylaxis, palliation or amelioration of a genetic disorder, e.g., an autosomal dominant genetic disorder, an autosomal recessive disorder, X-linked dominant genetic disorder, an X-linked recessive genetic disorder, or a Y-linked genetic disorder. In some embodiments, the genetic disorder is a monogenetic disorder or a poly genic disorder. In some embodiments, treatment of a genetic disorder, e.g., a monogenic disorder, comprises the use of an AAV particle described herein (e.g., an AAV particle comprising an AAV capsid variant described herein) for a gene replacement therapy.

[1327] In some embodiments, provided herein is method for treating a neurological disorder and/or neurodegenerative disorder in a subject, comprising administering to the subject an effective amount of a pharmaceutical composition described herein or an AAV particle, e.g., a plurality of particles, comprising an AAV capsid variant described herein. In some embodiments, treatment of a neurological disorder and/or neurodegenerative disorder comprises prevention of said neurological disorder and/or neurological disorder.

[1328] In some embodiments, the AAV particle (e.g., an AAV particle comprising an AAV capsid variant) of the disclosure is useful for the treatment, prophylaxis, palliation or amelioration of neurological diseases and/or disorders. In some embodiments, the AAV particle of the disclosure (e.g., an AAV particle comprising an AAV capsid variant) is useful for the treatment, prophylaxis, palliation or amelioration of tauopathy.

[1329] In some embodiments, the AAV particle of the disclosure (e.g., an AAV particle comprising an AAV capsid variant) is for the treatment, prophylaxis, palliation or amelioration of Alzheimer's Disease. In some embodiments, treatment of Alzheimer's Disease comprises the use of an AAV particle described herein (e.g., an AAV particle comprising an AAV capsid variant described herein) for a gene replacement therapy. In some embodiments, the payload encoded by an AAV particle comprising a capsid variant described herein comprises an ApoE2 protein, ApoE4 protein, an ApoE3 protein, BDNF protein, CYP46A1 protein, Klotho protein, fractalkine (FKN) protein, neprilysin protein (NEP), CD74 protein, caveolin-1, or a combination or variant thereof. In some embodiments, treatment of Alzheimer's Disease comprises the use of an AAV particle described herein (e.g., an AAV particle comprising an AAV capsid variant described herein) for a reduction in the expression of a tau gene and/or protein, a synuclein gene and/or protein, or a combination or variant thereof. In some embodiments, the payload encoded by an AAV particle comprising a capsid variant described herein comprises an antibody that binds to tau or synuclein, an RNAi agent for inhibiting tau or synuclein, a gene editing system (e.g., a CRISPR-Cas system) for altering tau or synuclein expression, or a combination thereof.

[1330] In some embodiments, the AAV particle of the disclosure (e.g., an AAV particle comprising an AAV capsid variant) is for the treatment, prophylaxis, palliation or amelioration of frontal temporal dementia. In some embodiments, treatment of frontal temporal dementia comprises the use of an AAV particle described herein (e.g., an AAV particle comprising an AAV capsid variant described herein) for a gene replacement therapy. In some embodiments, the payload encoded by an AAV particle comprising a capsid variant described herein comprises a progranulin protein or variant thereof.

[1331] In some embodiments, the AAV particle of the disclosure (e.g., an AAV particle comprising an AAV capsid variant) is useful for the treatment, prophylaxis, palliation or amelioration of Parkinson's Disease. In some embodiments, treatment of Parkinson's disease comprises the use of an AAV particle described herein (e.g., an AAV particle comprising an AAV capsid variant described herein) for a gene replacement therapy. In some embodiments, the payload encoded by an AAV particle comprising a capsid variant described herein comprises an AADC protein, GAD protein, GDNF protein, TH-GCHI protein, GBA protein, AIMP2-DX2 protein, or a combination or variant thereof. In some embodiments, treatment of Parkinson's disease comprises the use of an AAV particle described herein (e.g., an AAV particle comprising an AAV capsid variant described herein) for a gene knock-down therapy or a gene editing therapy (e.g., knock-out, repression, or correction). In some embodiments, the payload encoded by an AAV particle comprising a capsid variant described herein comprises a modulator, e.g., an RNAi agent or a CRISPR-Cas system, for altering expression of an alpha-synuclein gene, mRNA, and/or protein, or variant thereof.

[1332] In some embodiments, the AAV particle of the disclosure (e.g., an AAV particle comprising an AAV capsid variant) is useful for the treatment, prophylaxis, palliation or amelioration of an AADC deficiency. In some embodiments, treatment of AADC deficiency comprises the use of an AAV particle described herein (e.g., an AAV particle comprising an AAV capsid variant described herein) for a gene replacement therapy. In some embodiments, the payload encoded by an AAV particle comprising a capsid variant described herein comprises an AADC protein or variant thereof.

[1333] In some embodiments, the AAV particle of the disclosure (e.g., an AAV particle comprising an AAV capsid variant) is useful for the treatment, prophylaxis, palliation or amelioration of Amyotrophic lateral sclerosis (ALS). In some embodiments, treatment of ALS comprises the use of an AAV particle described herein (e.g., an AAV particle comprising an AAV capsid variant described herein) for a gene replacement therapy. In some embodiments, the payload encoded by an AAV particle comprising a capsid variant described herein comprises an TDP-43 protein, UPF1 protein, C9orf72 protein, CCNF protein, HSF1 protein, Factor H protein, NGF protein, ADAR2 protein, GDNF protein, VEGF protein, HGF protein, NRTN protein, AIMP2-DX2 protein, or a combination or variant thereof. In some embodiments, treatment of ALS comprises the use of an AAV particle described herein (e.g., an AAV particle comprising an AAV capsid variant described herein) for a gene knock-down therapy or a gene editing therapy (e.g., knock-out, repression, or correction). In some embodiments, the payload encoded by an AAV particle comprising a capsid variant described herein comprises a modulator, e.g., an RNAi agent or a CRISPR-Cas system, for altering expression of a SOD1 or C9ORF72 gene, mRNA, and/or protein, or a combination or variant thereof.

[1334] In some embodiments, the AAV particle of the disclosure (e.g., an AAV particle comprising an AAV capsid variant) is useful for the treatment, prophylaxis, palliation or amelioration of Huntington's Disease. In some embodiments, treatment of ALS comprises the use of an AAV particle described herein (e.g., an AAV particle comprising an AAV capsid variant described herein) for a gene knock-down (e.g., knock-out) therapy or a gene editing therapy (e.g., knock-out, repression, or correction). In some embodiments, the payload encoded by an AAV particle comprising a capsid variant described herein comprises a modulator, e.g., an RNAi agent or a CRISPR-Cas system, for altering expression of an HTT gene, mRNA, and/or protein, or a variant thereof.

[1335] In some embodiments, the AAV particle of the disclosure (e.g., an AAV particle comprising an AAV capsid variant) is useful for the treatment, prophylaxis, palliation or amelioration of spinal muscular atrophy. In some embodiments, treatment of spinal muscular atrophy comprises the use of an AAV particle described herein (e.g., an AAV particle comprising an AAV capsid variant described herein) for a gene replacement therapy. In some embodiments, the payload encoded by an AAV particle comprising a capsid variant described herein comprises an SMN1 protein, an SMN2 protein, or a combination or variant thereof.

[1336] In some embodiments, the AAV particle of the disclosure (e.g., an AAV particle comprising an AAV capsid variant) is useful for the treatment, prophylaxis, palliation or amelioration of multiple system atrophy. In some embodiments, treatment of multiple system atrophy comprises the use of an AAV particle described herein (e.g., an AAV particle comprising an AAV capsid variant described herein) for a gene replacement therapy.

[1337] In some embodiments, the AAV particle of the disclosure (e.g., an AAV particle comprising an AAV capsid variant) is useful for the treatment, prophylaxis, palliation or amelioration of Gaucher disease (GD) (e.g., Type 1 GD, Type 2 GD, or Type 3 GD). In some embodiments, the AAV particle of the disclosure (e.g., an AAV particle comprising an AAV capsid variant) is useful for the treatment, prophylaxis, palliation or amelioration of Parkinson's disease associated with a GBA mutation. In some embodiments, the AAV particle of the disclosure (e.g., an AAV particle comprising an AAV capsid variant) is useful for the treatment, prophylaxis, palliation or amelioration of dementia with Lewy Bodies (DLB).

[1338] In some embodiments, the AAV particle of the disclosure (e.g., an AAV particle comprising an AAV capsid variant) is useful for treatment, prophylaxis, palliation or amelioration of a leukodystrophy, e.g., Alexander disease, autosomal dominant leukodystrophy with autonomic diseases (ADLD), adrenoleukodystrophy (ALD), Canavan disease, cerebrotendinous xanthomatosis (CTX), metachromatic leukodystrophy (MLD), Pelizaeus-Merzbacher disease, or Refsum disease. In some embodiments, treatment of MLD comprises the use of an AAV particle described herein (e.g., an AAV particle comprising an AAV capsid variant described herein) for a gene replacement therapy. In some embodiments, the payload encoded by an AAV particle comprising a capsid variant described herein comprises an ARSA protein or variant thereof. In some embodiments, treatment of ALD comprises the use of an AAV particle described herein (e.g., an AAV particle comprising an AAV capsid variant described herein) for a gene replacement therapy. In some embodiments, the payload encoded by an AAV particle comprising a capsid variant described herein comprises an ABCD-1 protein or variant thereof.

[1339] In some embodiments, the AAV particle of the disclosure (e.g., an AAV particle comprising an AAV capsid variant) is useful for the treatment, prophylaxis, palliation, or amelioration of megalencephalic leukoencephalopathy (MLC). In some embodiments, treatment of MLC comprises the use of an AAV particle described herein (e.g., an AAV particle comprising an AAV capsid variant described herein) for a gene replacement therapy. In some embodiments, the payload encoded by an AAV particle comprising a capsid variant described herein comprises an MLC1 protein or variant thereof.

[1340] In some embodiments, the AAV particle of the disclosure (e.g., an AAV particle comprising an AAV capsid variant) is useful for the treatment, prophylaxis, palliation, or amelioration of Krabbe disease. In some embodiments, treatment of Krabbe disease comprises the use of an AAV particle described herein (e.g., an AAV particle comprising an AAV capsid variant described herein) for a gene replacement therapy. In some embodiments, the payload encoded by an AAV particle comprising a capsid variant described herein comprises a GALC protein or variant thereof.

[1341] In some embodiments, the AAV particle of the disclosure (e.g., an AAV particle comprising an AAV capsid variant) is useful for the treatment, prophylaxis, palliation, or amelioration of Mucopolysaccharidosis, e.g., a Type I (MPS I), Type II (MPS II), Type IIIA (MPS IIIA), Type IIIB (MPS IIIB), or Type IIIC (MPS IIIC). In some embodiments, treatment of Mucopolysaccharidosis comprises the use of an AAV particle described herein (e.g., an AAV particle comprising an AAV capsid variant described herein) for a gene replacement therapy or a gene editing therapy (e.g., enhancement or correction). In some embodiments, the payload encoded or corrected by an AAV particle comprising a capsid variant described herein comprises an IDUA protein, IDS protein, SGSH protein, NAGLU protein, HGSNAT protein, or a combination or variant thereof.

[1342] In some embodiments, the AAV particle of the disclosure (e.g., an AAV particle comprising an AAV capsid variant) is useful for the treatment, prophylaxis, palliation, or amelioration of Batten/NCL. In some embodiments, treatment of Batten/NCL comprises the use of an AAV particle described herein (e.g., an AAV particle comprising an AAV capsid variant described herein) for a gene replacement therapy. In some embodiments, the payload encoded by an AAV particle comprising a capsid variant described herein comprises a CLN1 protein, CLN2 protein, CLN3 protein, CLN5 protein, CLN6 protein, CLN7 protein, CLN8 protein, or a combination or variant thereof.

[1343] In some embodiments, the AAV particle of the disclosure (e.g., an AAV particle comprising an AAV capsid variant) is useful for the treatment, prophylaxis, palliation or amelioration of Rett Syndrome. In some embodiments, treatment of Rett Syndrome comprises the use of an AAV particle described herein (e.g., an AAV particle comprising an AAV capsid variant described herein) for a gene replacement therapy. In some embodiments, the payload encoded by an AAV particle comprising a capsid variant described herein comprises an MeCP2 protein or variant thereof.

[1344] In some embodiments, the AAV particle of the disclosure (e.g., an AAV particle comprising an AAV capsid variant) is useful for the treatment, prophylaxis, palliation, or amelioration of Angelman Syndrome. In some embodiments, treatment of Angelman Syndrome comprises the use of an AAV particle described herein (e.g., an AAV particle comprising an AAV capsid variant described herein) for a gene replacement therapy. In some embodiments, the payload encoded by an AAV particle comprising a capsid variant described herein comprises a UBE3A protein or variant thereof.

[1345] In some embodiments, the AAV particle of the disclosure (e.g., an AAV particle comprising an AAV capsid variant) is useful for the treatment, prophylaxis, palliation, or amelioration of Fragile X Syndrome. In some embodiments, treatment of Fragile X Syndrome comprises the use of an AAV particle described herein (e.g., an AAV particle comprising an AAV capsid variant described herein) for a gene replacement therapy. In some embodiments, the payload encoded by an AAV particle comprising a capsid variant described herein comprises a Reelin protein, a DgkK protein, a FMRI protein, or a combination or variant thereof.

[1346] In some embodiments, the AAV particle of the disclosure (e.g., an AAV particle comprising an AAV capsid variant) is useful for the treatment, prophylaxis, palliation, or amelioration of Canavan Disease. In some embodiments, treatment of Canavan Disease comprises the use of an AAV particle described herein (e.g., an AAV particle comprising an AAV capsid variant described herein) for a gene replacement therapy. In some embodiments, the payload encoded by an AAV particle comprising a capsid variant described herein comprises an ASPA protein or variant thereof.

[1347] In some embodiments, the AAV particle of the disclosure (e.g., an AAV particle comprising an AAV capsid variant) is useful for the treatment, prophylaxis, palliation, or amelioration of a Gangliosidosis, e.g., a GM1 Gangliosidosis or a GM2 Gangliosidosis (e.g., Tay Sachs Sandhoff). In some embodiments, treatment of a Gangliosidosis, e.g., a GM1 Gangliosidosis or a GM2 Gangliosidosis (e.g., Tay Sachs Sandhoff), comprises the use of an AAV particle described herein (e.g., an AAV particle comprising an AAV capsid variant described herein) for a gene replacement therapy. In some embodiments, the payload encoded by an AAV particle comprising a capsid variant described herein comprises a GLB1 protein, a HEXA protein, a HEXB protein, a GM2A protein, or a combination or variant thereof.

[1348] In some embodiments, the AAV particle of the disclosure (e.g., an AAV particle comprising an AAV capsid variant) is useful for the treatment, prophylaxis, palliation, or amelioration of GM3 Synthase Deficiency. In some embodiments, treatment of GM3 Synthase Deficiency comprises the use of an AAV particle described herein (e.g., an AAV particle comprising an AAV capsid variant described herein) for a gene replacement therapy. In some embodiments, the payload encoded by an AAV particle comprising a capsid variant described herein comprises an ST3GAL5 protein or variant thereof.

[1349] In some embodiments, the AAV particle of the disclosure (e.g., an AAV particle comprising an AAV capsid variant) is useful for the treatment, prophylaxis, palliation, or amelioration of a Niemann-Pick disorder, e.g., a Niemann-Pick A or a Niemann-Pick C1 (NPC-1). In some embodiments, treatment of a Niemann-Pick disorder, e.g., a Niemann-Pick A or a Niemann-Pick C1 (NPC-1) comprises the use of an AAV particle described herein (e.g., an AAV particle comprising an AAV capsid variant described herein) for a gene replacement therapy. In some embodiments, the payload encoded by an AAV particle comprising a capsid variant described herein comprises an ASM protein, an NPC1 protein, or variant thereof.

[1350] In some embodiments, the AAV particle of the disclosure (e.g., an AAV particle comprising an AAV capsid variant) is useful for the treatment, prophylaxis, palliation, or amelioration of Schwannoma (e.g., Neuroma). In some embodiments, treatment of Schwannoma (e.g., Neuroma) comprises the use of an AAV particle described herein (e.g., an AAV particle comprising an AAV capsid variant described herein) for a gene replacement therapy. In some embodiments, the payload encoded by an AAV particle comprising a capsid variant described herein comprises a Caspase-1 protein or variant thereof.

[1351] In some embodiments, the AAV particle of the disclosure (e.g., an AAV particle comprising an AAV capsid variant) is useful for the treatment, prophylaxis, palliation, or amelioration of a Tuberous Sclerosis, e.g., Tuberous Sclerosis Type 1 or Tuberous Sclerosis Type 2. In some embodiments, treatment of Tuberous Sclerosis, e.g., Tuberous Sclerosis Type 1 or Tuberous Sclerosis Type 2 comprises the use of an AAV particle described herein (e.g., an AAV particle comprising an AAV capsid variant described herein) for a gene replacement therapy. In some embodiments, the payload encoded by an AAV particle comprising a capsid variant described herein comprises a TSC1 protein, a TSC2 protein, or variant thereof.

[1352] In some embodiments, the AAV particle of the disclosure (e.g., an AAV particle comprising an AAV capsid variant) is useful for the treatment, prophylaxis, palliation, or amelioration of a CDKL5 Deficiency. In some embodiments, treatment of a CDKL5 Deficiency comprises the use of an AAV particle described herein (e.g., an AAV particle comprising an AAV capsid variant described herein) for a gene replacement therapy. In some embodiments, the payload encoded by an AAV particle comprising a capsid variant described herein comprises a CDKL5 protein or variant thereof.

[1353] In some embodiments, the AAV particle of the disclosure (e.g., an AAV particle comprising an AAV capsid variant) is useful for the treatment, prophylaxis, palliation, or amelioration of a Charcot-Marie-Tooth disorder, e.g., a Charcot-Marie-Tooth Type 1X (CMT1X) disorder, a Charcot-Marie-Tooth Type 2A (CMT2A) disorder, or a Charcot-Marie-Tooth Type 4J (CMT4J) disorder. In some embodiments, treatment of a Charcot-Marie-Tooth disorder, e.g., a Charcot-Marie-Tooth Type 1X (CMT1X) disorder, a Charcot-Marie-Tooth Type 2A (CMT2A) disorder, or a Charcot-Marie-Tooth Type 4J (CMT4J) disorder, comprises the use of an AAV particle described herein (e.g., an AAV particle comprising an AAV capsid variant described herein) for a gene replacement therapy. In some embodiments, the payload encoded by an AAV particle comprising a capsid variant described herein comprises a GJB1 protein, a MFN2 protein, a FIG. 4 protein, or variant thereof.

[1354] In some embodiments, the AAV particle of the disclosure (e.g., an AAV particle comprising an AAV capsid variant) is useful for the treatment, prophylaxis, palliation, or amelioration of an Aspartylglucosaminuria (AGU). In some embodiments, treatment of an AGU comprises the use of an AAV particle described herein (e.g., an AAV particle comprising an AAV capsid variant described herein) for a gene replacement therapy. In some embodiments, the payload encoded by an AAV particle comprising a capsid variant described herein comprises an AGA protein or variant thereof.

[1355] In some embodiments, the AAV particle of the disclosure (e.g., an AAV particle comprising an AAV capsid variant) is useful for the treatment, prophylaxis, palliation, or amelioration of a Leigh Syndrome. In some embodiments, treatment of a Leigh Syndrome comprises the use of an AAV particle described herein (e.g., an AAV particle comprising an AAV capsid variant described herein) for a gene replacement therapy. In some embodiments, the payload encoded by an AAV particle comprising a capsid variant described herein comprises a SURF1 protein or variant thereof.

[1356] In some embodiments, the AAV particle of the disclosure (e.g., an AAV particle comprising an AAV capsid variant) is useful for the treatment, prophylaxis, palliation, or amelioration of epilepsy. In some embodiments, treatment of epilepsy comprises the use of an AAV particle described herein (e.g., an AAV particle comprising an AAV capsid variant described herein) for a gene replacement therapy. In some embodiments, the payload encoded by an AAV particle comprising a capsid variant described herein comprises an NPY/Y2 protein, a Galanin protein, a Dynorphin protein, an AIMP2-DX2 protein, an SLC6A1 protein, an SLC13A5 protein, a KCNQ2 protein, or variant thereof.

[1357] In some embodiments, the AAV particle of the disclosure (e.g., an AAV particle comprising an AAV capsid variant) is useful for the treatment, prophylaxis, palliation, or amelioration of a Dravet Syndrome. In some embodiments, treatment of Dravet Syndrome comprises the use of an AAV particle described herein (e.g., an AAV particle comprising an AAV capsid variant described herein) for a gene replacement therapy. In some embodiments, the payload encoded by an AAV particle comprising a capsid variant described herein comprises an SCN1a protein, or variant thereof.

[1358] In some embodiments, the AAV particle of the disclosure (e.g., an AAV particle comprising an AAV capsid variant) is useful for the treatment, prophylaxis, palliation, or amelioration of a Duchenne muscular dystrophy (DMD). In some embodiments, treatment of DMD comprises the use of an AAV particle described herein (e.g., an AAV particle comprising an AAV capsid variant described herein) for a gene replacement therapy or enhancement (e.g., correction of exon-skipping), or a gene editing therapy (e.g., enhancement or correction). In some embodiments, the payload encoded or corrected by an AAV particle comprising a capsid variant described herein comprises a Dystrophin gene and/or protein, a Utrophin gene and/or protein, or a GALGT2 gene and/or protein, or a Follistatin gene and/or protein, or a combination or variant thereof.

[1359] In some embodiments, the AAV particle of the disclosure (e.g., an AAV particle comprising an AAV capsid variant) is useful for the treatment, prophylaxis, palliation, or amelioration of Pompe Disease. In some embodiments, treatment of Pompe Disease comprises the use of an AAV particle described herein (e.g., an AAV particle comprising an AAV capsid variant described herein) for a gene replacement therapy. In some embodiments, the payload encoded by an AAV particle comprising a capsid variant described herein comprises a GAA protein, or variant thereof.

[1360] In some embodiments, the AAV particle of the disclosure (e.g., an AAV particle comprising an AAV capsid variant) is useful for the treatment, prophylaxis, palliation, or amelioration of Limb-Girdle Muscular Dystrophy (LGMD2A). In some embodiments, treatment of LGMD2A comprises the use of an AAV particle described herein (e.g., an AAV particle comprising an AAV capsid variant described herein) for a gene replacement therapy. In some embodiments, the payload encoded by an AAV particle comprising a capsid variant described herein comprises a CAPN-3 protein, DYSF protein, a SGCG protein, a SGCA protein, a SGCB protein, a FKRP protein, a ANO5 protein, or a combination or variant thereof.

[1361] In some embodiments, the AAV particle of the disclosure (e.g., an AAV particle comprising an AAV capsid variant) is useful for the treatment, prophylaxis, palliation, or amelioration of chronic or neuropathic pain.

[1362] In some embodiments, the AAV particle of the disclosure (e.g., an AAV particle comprising AAV capsid variant) is useful for treatment, prophylaxis, palliation, or amelioration of a disease associated with the central nervous system.

[1363] In some embodiments, the AAV particle of the disclosure (e.g., an AAV particle comprising an AAV capsid variant) is useful for treatment, prophylaxis, palliation, or amelioration of a disease associated with the peripheral nervous system.

[1364] In some embodiments, the AAV particle of the disclosure (e.g., an AAV particle comprising an AAV capsid variant) is useful for treatment, prophylaxis, palliation, or amelioration of a neuro-oncological disorder in a subject. In some embodiments, treatment of a neuro-oncological disorder comprises prevention of said neuro-oncological disorder. In some embodiments, a neuro-oncological disorder comprises a cancer of a primary CNS origin (e.g., a CNS cell, a tissue, or a region), or a metastatic cancer in a CNS cell, tissue, or region. Examples of primary CNS cancers could be gliomas (which may include glioblastoma (also known as glioblastoma multiforme), astrocytomas, oligodendrogliomas, and ependymomas, and mixed gliomas), meningiomas, medulloblastomas, neuromas, and primary CNS lymphoma (in the brain, spinal cord, or meninges), among others. Examples of metastatic cancers include those originating in another tissue or organ, e.g., breast, lung, lymphoma, leukemia, melanoma (skin cancer), colon, kidney, prostate, or other types that metastasize to brain.

[1365] In some embodiments, the AAV particle of the disclosure (e.g., an AAV particle comprising an AAV capsid variant) is useful for the treatment, prophylaxis, palliation, or amelioration of a disease associated with expression of HER2, e.g., a disease associated with overexpression of HER2. In some embodiments, the AAV particle of the disclosure (e.g., an AAV particle comprising an AAV capsid variant) is useful for the treatment, prophylaxis, palliation, or amelioration of a HER2-positive cancer. In some embodiments, the HER2-positive cancer is a HER2-positive solid tumor. Additionally, or alternatively, the HER2-positive cancer may be a locally advanced or metastatic HER2-positive cancer. In some instances, the HER2-positive cancer is a HER2-positive breast cancer or a HER2-positive gastric cancer. In some embodiments, the HER2-positive cancer is selected from the group consisting of a HER2-positive gastroesophageal junction cancer, a HER2-positive colorectal cancer, a HER2-positive lung cancer (e.g., a HER2-positive non-small cell lung carcinoma), a HER2-positive pancreatic cancer, a HER2-positive colorectal cancer, a HER2-positive bladder cancer, a HER2-positive salivary duct cancer, a HER2-positive ovarian cancer (e.g., a HER2-positive epithelial ovarian cancer), or a HER2-positive endometrial cancer. In some instances, the HER2-positive cancer is prostate cancer. In some embodiments, the HER2-positive cancer has metastasized to the central nervous system (CNS). In some instances, the metastasized HER2-cancer has formed CNS neoplasms.

[1366] In some embodiments, the AAV particle of the disclosure (e.g., an AAV particle comprising an AAV capsid variant) is useful for treatment, prophylaxis, palliation, or amelioration of a muscular disorder and/or neuromuscular disorder in a subject. In some embodiments, treatment of a muscular disorder and/or neuromuscular disorder comprises prevention of said muscular disorder and/or neuromuscular disorder.

[1367] In some embodiments, the AAV particle of the disclosure (e.g., an AAV particle comprising an AAV capsid variant) is useful for treatment, prophylaxis, palliation or amelioration of a cardiac disease or heart disease and/or method of improving (e.g., enhancing) cardiac function in a subject. In some embodiments, the cardiac disease is a cardiomyopathy (e.g., arrhythmogenic right ventricular cardiomyopathy, dilated cardiomyopathy, or hypertrophic cardiomyopathy), congestive heart failure, tachycardia (e.g., catecholaminergic polymorphic ventricular tachycardia), ischemic heart disease, and/or myocardial infarction. In some embodiments, the cardiac disease is a disease associated with expression, e.g., aberrant expression, of LAMP2B, MYBPC3, TNNI3, LMNA, BAG3, DWORF, PKP2, Cx43, TAZ, CASQ2, SERCA2a, I-1c, S100A1 and/or ARC, S100A1, ASCL1, miR133, Mydelta3, Sav, or a combination or variant thereof. In some embodiments, treatment of a cardiac disorder described herein comprises the use of an AAV particle described herein (e.g., an AAV particle comprising an AAV capsid variant described herein) for a gene replacement therapy.

[1368] In some embodiments, the cardiac disease is a genetic disorder, e.g., an autosomal dominant genetic disorder, an autosomal recessive disorder, or an X-linked recessive genetic disorder. In some embodiments, the cardiomyopathy is a genetic disorder, e.g., a genetic disorder associated with an abnormality (e.g., mutation, insertion, rearrangement and/or deletion) in a gene chosen from TTN, LMNA, MYH7, MYH6, SCN5A, TNNT2, RBM20, TNNI3, MYL2, MYL3, PKP2, DSP, DSG2, DSC2, JUP, or a combination thereof. In some embodiments, the cardiac disorder is a dilated cardiomyopathy, e.g., a dilated cardiomyopathy associated with an abnormality (e.g., mutation, insertion, rearrangement and/or deletion) in a gene chosen from TTN, LMNA, MIH7, BAG3, MIPN, TNNT2, SCN5A, RBN20, TNPO, LAMA4, VCL, LDB3, TCAP, PSEN1/2, ACTN2, CRYAB, TPM1, ABCC9, ACTC1, PDLIM3, ILK, TNNC1, TNNI3, PLN, DES, SGCD, CSRP3, MIH6, EYA4, ANKRD1, DMD, GATAD1, TAZ/G4.5, or combination thereof. In some embodiments, the cardiac disorder is a hypertrophic cardiomyopathy, e.g., a hypertrophic cardiomyopathy associated with an abnormality (e.g., mutation, insertion, rearrangement and/or deletion) in a gene chosen from MYH7, TNNT2, TNNI3, TPM1, MYL2, MYL3, ACTC1, CSRP3, TTN, ACTN2, MYH6, TCAP, TNNC1, or a combination thereof. In some embodiments, the cardiac disorder is an arrhythmogenic ventricular cardiomyopathy, e.g., an arrhythmogenic ventricular cardiomyopathy associated with an abnormality (e.g., mutation, insertion, rearrangement and/or deletion) in a gene chosen from PKP2, DSG2, DSP, RYR2, DSC2, TGFB3, TMEM43, DES, TTN, LMNA, or a combination thereof.

[1369] In some embodiments, the AAV particle of the present disclosure (e.g., an AAV particle comprising an AAV capsid polypeptide, e.g., an AAV capsid variant) is administered to a subject having at least one of the diseases or symptoms described herein. In some embodiments, an AAV particle of the present disclosure is administered to a subject having or diagnosed with having a disease or disorder described herein.

[1370] Any neurological disease or disorder, neurodegenerative disorder, muscular disorder, neuromuscular disorder, and/or neuro-oncological disorder may be treated with the AAV particles of the disclosure, or pharmaceutical compositions thereof.

### Pharmaceutical Composition and Formulations

[1371] According to the present disclosure, an AAV particle comprising an AAV capsid variant described herein may be prepared as a pharmaceutical composition. In some embodiments, the pharmaceutical composition comprises at least one active ingredients. In some embodiments, the pharmaceutical composition comprises a pharmaceutically acceptable excipient.

[1372] In some embodiments, an AAV particle of the present disclosure (e.g., an AAV particle comprising an AAV capsid polypeptide, e.g., an AAV capsid variant) can be formulated using an excipient to: (1) increase stability; (2) increase cell transfection or transduction; (3) permit the sustained or delayed expression of the payload; (4) alter the biodistribution (e.g., target the viral particle to specific tissues or cell types); (5) increase the translation of encoded protein; (6) alter the release profile of encoded protein; and/or (7) allow for regulatable expression of the payload. Formulations of the present disclosure can include, without limitation, saline, liposomes, lipid nanoparticles, polymers, peptides, proteins, cells transfected with viral vectors (e.g., for transfer or transplantation into a subject) and combinations thereof.

[1373] In some embodiments, the relative amount of the active ingredient (e.g., an AAV particle comprising an AAV capsid variant described herein), a pharmaceutically acceptable excipient, and/or any additional ingredients in a pharmaceutical composition in accordance with the present disclosure may vary, depending upon the identity, size, and/or condition of the subject being treated and further depending upon the route by which the composition is to be administered. For example, the composition may comprise between 0.1% and 99% (w/w) of the active ingredient. By way of example, the composition may comprise between 0.1% and 100%, e.g., between 0.5 and 50%, between 1-30%, between 5-80%, at least 80% (w/w) active ingredient.

[1374] In some embodiments, the pharmaceutical composition comprising an AAV particle described herein may comprise an AAV capsid variant and a viral genome encoding a payload, e.g., a payload described herein, with or without a pharmaceutically acceptable excipient.

[1375] The present disclosure also provides in some embodiments, a pharmaceutical composition suitable for administration to a subject, e.g., a human. In some embodiments, the pharmaceutical composition is administered to a subject, e.g., a human.

### Administration

[1376] In some embodiments, an AAV particle disclosed herein (e.g., an AAV particle comprising an AAV capsid variant) may be administered by a to a subject by a delivery route, e.g., a localized delivery route or a systemic delivery route.

[1377] In some embodiments, an AAV particle described herein (e.g., an AAV particle comprising an AAV capsid variant) may be administered via such a route that it is able to cross the blood-brain barrier, vascular barrier, or other epithelial barrier. In some embodiments, an AAV particle of the present disclosure (e.g., an AAV particle comprising an AAV capsid variant) may be administered in any suitable form, either as a liquid solution or suspension, as a solid form suitable for liquid solution or suspension in a liquid solution. In some embodiments, an AAV particle (e.g., an AAV particle comprising an AAV capsid variant) may be formulated with any appropriate and pharmaceutically acceptable excipient.

[1378] In some embodiments, the AAV particle described herein (e.g., an AAV particle comprising an AAV capsid variant) is administered intramuscularly, intravenously, intracerebrally, intrathecally, intracerebroventricularly, via intraparenchymal administration, or via intra-cisterna magna injection (ICM).

[1379] In some embodiments, an AAV particle of the present disclosure (e.g., an AAV particle comprising an AAV capsid variant) may be delivered to a subject via a single route administration. In some embodiments, an AAV particle of the present disclosure may be delivered to a subject via a multi-site route of administration. In some embodiments, a subject may be administered at 2, 3, 4, 5, or more than 5 sites.

[1380] In some embodiments, an AAV particle of the present disclosure (e.g., an AAV particle comprising an AAV capsid variant) is administered via a bolus infusion. In some embodiments, an AAV particle of the present disclosure is administered via sustained delivery over a period of minutes, hours, or days. In some embodiments, the infusion rate may be changed depending on the subject, distribution, formulation, and/or another delivery parameter. In some embodiments, an AAV particle of the present disclosure is administered using a controlled release. In some embodiments, an AAV particle of the present disclosure is administered using a sustained release, e.g., a release profile that conforms to a release rate over a specific period of time.

[1381] In some embodiments, an AAV particle (e.g., an AAV particle comprising an AAV capsid variant) may be delivered by more than one route of administration. As non-limiting examples of combination administrations, an AAV particle may be delivered by intrathecal and intracerebroventricular, or by intravenous and intraparenchymal administration.

### Intravenous Administration

[1382] In some embodiments, an AAV particle described herein (e.g., an AAV particle comprising an AAV capsid polypeptide, e.g., an AAV capsid variant) may be administered to a subject by systemic administration. In some embodiments, the systemic administration is intravenous administration. In another embodiment, the systemic administration is intraarterial administration. In some embodiments, an AAV particle of the present disclosure may be administered to a subject by intravenous administration. In some embodiments, the intravenous administration may be achieved by subcutaneous delivery. In some embodiments, the AAV particle is administered to the subject via focused ultrasound (FUS), e.g., coupled with the intravenous administration of microbubbles (FUS-MB) or MRI-guided FUS coupled with intravenous administration, e.g., as described in Terstappen et al. (Nat Rev Drug Discovery, doi.org/10.1038/s41573-021-00139-y (2021)), the contents of which are incorporated herein by reference in its entirety. In some embodiments, the AAV particle, e.g., an AAV particle described herein, is administered to the subject intravenously. In some embodiments, the subject is a human.

### Administration to the CNS

[1383] In some embodiments, an AAV particle described herein (e.g., an AAV particle comprising an AAV capsid variant) may be delivered by direct injection into the brain. As a non-limiting example, the brain delivery may be by intrahippocampal administration. In some embodiments, an AAV particle of the present disclosure may be administered to a subject by intraparenchymal administration. In some embodiments, the intraparenchymal administration is to tissue of the central nervous system. In some embodiments, an AAV particle of the present disclosure may be administered to a subject by intracranial delivery (See, e.g., U.S. Pat. No. 8,119,611; the content of which is incorporated herein by reference in its entirety). In some embodiments, an AAV particle described herein may be delivered by injection into the CSF pathway. Non-limiting examples of delivery to the CSF pathway include intrathecal and intracerebroventricular administration. In some embodiments, an AAV particle described herein may be administered via intracisternal magna (ICM) injection.

[1384] In some embodiments, an AAV particle of the present disclosure (e.g., an AAV particle comprising an AAV capsid variant) may be delivered to the brain by systemic delivery. As a non-limiting example, the systemic delivery may be by intravascular administration. As a non-limiting example, the systemic or intravascular administration may be intravenous.

[1385] In some embodiments, an AAV particle (e.g., an AAV particle comprising an AAV capsid variant) of the present disclosure may be delivered by an intraocular delivery route. A non-limiting example of an intraocular administration includes an intravitreal injection.

### Intramuscular Administration

[1386] In some embodiments, an AAV particle described herein (e.g., an AAV particle comprising an AAV capsid variant) may be delivered by intramuscular administration. Without wishing to be bound by theory, it is believed in some embodiments, that the multi-nucleated nature of muscle cells provides an advantage to gene transduction subsequent to AAV delivery. In some embodiments, cells of the muscle are capable of expressing recombinant proteins with the appropriate post-translational modifications. Without wishing to be bound by theory, it is believed in some embodiments, the enrichment of muscle tissue with vascular structures allows for transfer to the blood stream and whole-body delivery. Examples of intramuscular administration include systemic (e.g., intravenous), subcutaneous or directly into the muscle. In some embodiments, more than one injection is administered. In some embodiments, an AAV particle of the present disclosure may be delivered by an intramuscular delivery route. (See, e.g., U.S. Pat. No. 6,506,379; the content of which is incorporated herein by reference in its entirety). Non-limiting examples of intramuscular administration include an intravenous injection or a subcutaneous injection.

[1387] In some embodiments, an AAV particle of the present disclosure (e.g., an AAV particle comprising an AAV capsid variant) is administered to a subject and transduces the muscle of a subject. As a non-limiting example, an AAV particle is administered by intramuscular administration. In some embodiments, an AAV particle of the present disclosure may be administered to a subject by subcutaneous administration. In some embodiments, the intramuscular administration is via systemic delivery. In some embodiments, the intramuscular administration is via intravenous delivery. In some embodiments, the intramuscular administration is via direct injection to the muscle.

[1388] In some embodiments, the muscle is transduced by administration, e.g., intramuscular administration. In some embodiments, an intramuscular delivery comprises administration at one site. In some embodiments, an intramuscular delivery comprises administration at more than one site. In some embodiments, an intramuscular delivery comprises administration at two, three, four, or more sites. In some embodiments, intramuscular delivery is combined with at least one other method of administration.

[1389] In some embodiments, an AAV particle pf the present disclosure (e.g., an AAV particle comprising an AAV capsid variant) may be administered to a subject by peripheral injections. Non-limiting examples of peripheral injections include intraperitoneal, intramuscular, intravenous, conjunctival, or joint injection. It was disclosed in the art that the peripheral administration of AAV particles can be transported to the central nervous system, for example, to the motor neurons (e.g., U.S. Patent Publication Nos. 20100240739 and 20100130594; the content of each of which is incorporated herein by reference in their entirety).

[1390] In some embodiments, an AAV particle of the present disclosure (e.g., an AAV particle comprising an AAV capsid variant) may be administered to a subject by intraparenchymal administration. In some embodiments, the intraparenchymal administration is to muscle tissue. In some embodiments, an AAV particle of the present disclosure is delivered as described in Bright et al 2015 (Neurobiol Aging. 36 (2): 693-709), the contents of which are herein incorporated by reference in their entirety. In some embodiments, an AAV particle of the present disclosure is administered to the gastrocnemius muscle of a subject. In some embodiments, an AAV particle of the present disclosure is administered to the bicep femorii of the subject. In some embodiments, an AAV particles of the present disclosure is administered to the tibialis anterior muscles. In some embodiments, an AAV particle of the present disclosure is administered to the soleus muscle.

### Depot Administration

[1391] As described herein, in some embodiments, a pharmaceutical composition and/or an AAV particle of the present disclosure (e.g., an AAV particle comprising an AAV capsid polypeptide, e.g., an AAV capsid variant) are formulated in depots for extended release. Generally, specific organs or tissues are targeted for administration.

[1392] In some embodiments, a pharmaceutical composition and/or an AAV particle of the present disclosure (e.g., an AAV particle comprising an AAV capsid polypeptide, e.g., an AAV capsid variant) are spatially retained within or proximal to target tissues. Provided are methods of providing a pharmaceutical composition, an AAV particle, to target tissues of mammalian subjects by contacting target tissues (which comprise one or more target cells) with the pharmaceutical composition and/or the AAV particle, under conditions such that they are substantially retained in target tissues, e.g., such that at least 10, 20, 30, 40, 50, 60, 70, 80, 85, 90, 95, 96, 97, 98, 99, 99.9, 99.99 or greater than 99.99% of the composition is retained in the target tissues. In some embodiments, retention is determined by measuring the amount of pharmaceutical composition and/or AAV particle, that enter a target cell or a plurality of target cells. For example, at least 1%, 5%, 10%, 20%, 30%, 40%, 50%, 60%, 70%, 80%, 85%, 90%, 95%, 96%, 97%, 98%, 99%, 99.9%, 99.99%, or greater than 99.99% of a pharmaceutical composition and/or an AAV particle, administered to a subject are present intracellularly at a period of time following administration. For example, intramuscular injection to a subject may be performed using aqueous compositions comprising a pharmaceutical composition and/or an AAV particle of the present disclosure and a transfection reagent, and retention is determined by measuring the amount of the pharmaceutical composition and/or the AAV particle, present in the muscle cell or plurality of muscle cells.

[1393] In some embodiments, disclosed herein are methods of providing a pharmaceutical composition and/or an AAV particle of the present disclosure (e.g., an AAV particle comprising an AAV capsid polypeptide, e.g., an AAV capsid variant) to a tissue of a subject, by contacting the tissue (comprising a cell, e.g., a plurality of cells) with the pharmaceutical composition and/or the AAV particle under conditions such that they are substantially retained in the tissue. In some embodiments, a pharmaceutical composition and/or AAV particle described herein comprise a sufficient amount of an active ingredient such that the effect of interest is produced in at least one cell. In some embodiments, a pharmaceutical composition and/or an AAV particle generally comprise one or more cell penetration agents. In some embodiments, the disclosure provides a naked formulations (such as without cell penetration agents or other agents), with or without pharmaceutically acceptable carriers.

### Methods of Treatment

[1394] Provided in the present disclosure are methods for introducing (e.g., delivering) an AAV particle of the present disclosure (e.g., an AAV particle comprising an AAV capsid variant described herein) into cells. In some embodiments, the method comprises introducing into said cells an AAV particle or vector described herein in an amount sufficient to modulate, e.g., increase, the production of a target gene, mRNA, and/or protein. In some embodiments, the method comprises introducing into said cells an AAV particle or vector described herein in an amount sufficient to modulate, e.g., decrease, expression of a target gene, mRNA, and/or protein. In some embodiments, the cells may be neurons such as but not limited to, motor, hippocampal, entorhinal, thalamic, cortical, sensory, sympathetic, or parasympathetic neurons, and glial cells such as astrocytes, microglia, and/or oligodendrocytes. In other embodiments, the cells may be a muscle cell (e.g., a cell of a diaphragm, a quadriceps, or a heart (e.g., a heart atrium or a heart ventricle)) or a liver cell. In some embodiments, the cell may be a heart cell (e.g., a cell of a heart atrium or a cell of a heart ventricle).

[1395] Disclosed in the present disclosure are methods for treating a neurological disease/disorder or a neurodegenerative disorder, a muscular or neuromuscular disorder, or a neuro-oncological disorder associated with aberrant, e.g., insufficient or increased, function/presence of a protein, e.g., a target protein in a subject in need of treatment.

[1396] In some embodiments, the method comprises administering to the subject a therapeutically effective amount of a composition comprising AAV particles of the present disclosure. As a non-limiting example, the AAV particles can increase target gene expression, increase target protein production, and thus reduce one or more symptoms of neurological disease in the subject such that the subject is therapeutically treated.

[1397] In other embodiments, the method comprises administering to the subject a therapeutically effective amount of a composition comprising AAV particles (e.g., an AAV particle comprising an AAV capsid polypeptide, e.g., an AAV capsid variant) comprising a viral genome with a nucleic acid sequence encoding one or more siRNA molecules. As a non-limiting example, the siRNA molecules can silence target gene expression, inhibit target protein production, and reduce one or more symptoms of neurological disease in the subject such that the subject is therapeutically treated.

[1398] In some embodiments, the composition comprising the AAV particles of the present disclosure (e.g., an AAV particle comprising an AAV capsid variant described herein) is administered to the central nervous system of the subject via systemic administration. In some embodiments, the systemic administration is intravenous (IV) injection. In some embodiments, the AAV particle described herein or a pharmaceutical composition comprising an AAV particle described herein is administered by focused ultrasound (FUS), e.g., coupled with the intravenous administration of microbubbles (FUS-MB) or MRI-guided FUS coupled with intravenous administration.

[1399] In some embodiments, the composition comprising the AAV particle of the present disclosure (e.g., an AAV particle comprising an AAV capsid variant) is administered to the central nervous system of the subject via intraventricular administration. In some embodiments, the composition comprising the AAV particle of the present disclosure (e.g., an AAV particle comprising an AAV capsid variant) is administered via intra-cisterna magna injection (ICM).

[1400] In some embodiments, the composition comprising an AAV particle of the present disclosure (e.g., an AAV particle comprising an AAV capsid variant) is administered to the central nervous system of the subject via intraventricular injection and intravenous injection.

[1401] In some embodiments, the composition comprising the AAV particle of the present disclosure (e.g., an AAV particle comprising an AAV capsid variant) is administered to the central nervous system of the subject via ICM injection and intravenous injection at a specific dose per subject. As a non-limiting example, the AAV particles are administered via ICM injection at a dose of 1×10⁴ VG per subject. As a non-limiting example, the AAV particles are administered via IV injection at a dose of 2×10¹³ VG per subject.

[1402] In some embodiments, the composition comprising the AAV particle of the present disclosure (e.g., an AAV particle comprising an AAV capsid variant) is administered to the central nervous system of the subject. In other embodiments, the composition comprising the AAV particles of the present disclosure is administered to a CNS tissue of a subject (e.g., putamen, hippocampus, thalamus, or cortex of the subject).

[1403] In some embodiments, the composition comprising the AAV particle of the present disclosure (e.g., an AAV particle comprising an AAV capsid variant) is administered to the central nervous system of the subject via intraparenchymal injection. Non-limiting examples of intraparenchymal injections include intraputamenal, intracortical, intrathalamic, intrastriatal, intrahippocampal or into the entorhinal cortex.

[1404] In some embodiments, the composition comprising the AAV particle of the present disclosure (e.g., an AAV particle comprising an AAV capsid variant) is administered to the central nervous system of the subject via intraparenchymal injection and intravenous injection.

[1405] In some embodiments, the composition comprising the AAV particle of the present disclosure (e.g., an AAV particle comprising an AAV capsid variant) is administered to the central nervous system of the subject via intraventricular injection, intraparenchymal injection and intravenous injection.

[1406] In some embodiments, the composition comprising an AAV particle (e.g., an AAV particle comprising an AAV capsid variant) of a plurality of particles of the present disclosure is administered to a muscle of the subject via intravenous injection. In some embodiments, the composition comprising an AAV particle of a plurality of particles of the present disclosure is administered to a muscle of the subject via intramuscular injection.

[1407] In some embodiments, an AAV particle of the present disclosure (e.g., an AAV particle comprising an AAV capsid variant) may be delivered into specific types of cells, including, but not limited to, thalamic, hippocampal, entorhinal, cortical, motor, sensory, excitatory, inhibitory, sympathetic, or parasympathetic neurons; glial cells including oligodendrocytes, astrocytes and microglia; and/or other cells surrounding neurons such as T cells. In some embodiments, an AAV particle of the present disclosure may be delivered into a muscle cell, e.g., a cell of the quadriceps, diaphragm, liver, and/or heart (e.g., heart atrium or heart ventricle).

[1408] In some embodiments, an AAV particle (e.g., an AAV particle comprising an AAV capsid polypeptide, e.g., an AAV capsid variant), e.g., a plurality of particles, of the present disclosure may be delivered to a cell or region of the midbrain. In some embodiments, an AAV particle (e.g., an AAV particle comprising an AAV capsid polypeptide, e.g., an AAV capsid variant), e.g., a plurality of particles, of the present disclosure may be delivered to a cell or region of the brains stem.

[1409] In some embodiments, an AAV particle (e.g., an AAV particle comprising an AAV capsid polypeptide, e.g., an AAV capsid variant), e.g., a plurality of particles, of the present disclosure may be delivered to neurons in the putamen, hippocampus, thalamus and/or cortex.

[1410] In some embodiments, an AAV particle (e.g., an AAV particle comprising an AAV capsid variant), e.g., a plurality of particles, of the present disclosure may be used as a therapy for a genetic disorder, e.g., an autosomal dominant genetic disorder, an autosomal recessive disorder, X-linked dominant genetic disorder, an X-linked recessive genetic disorder, or a Y-linked genetic disorder. In some embodiments, the genetic disorder is a monogenetic disorder or a polygenic disorder. In some embodiments, treatment of a genetic disorder, e.g., a monogenic disorder, comprises the use of an AAV particle described herein (e.g., an AAV particle comprising an AAV capsid variant described herein) for a gene replacement therapy.

[1411] In some embodiments, an AAV particle (e.g., an AAV particle comprising an AAV capsid variant), e.g., a plurality of particles, of the present disclosure may be used as a therapy for a neurological disease.

[1412] In some embodiments, an AAV particle (e.g., an AAV particle comprising an AAV capsid variant), e.g., a plurality of particles, of the present disclosure may be used as a therapy for tauopathies.

[1413] In some embodiments, an AAV particle (e.g., an AAV particle comprising an AAV capsid variant), e.g., a plurality of particles, of the present disclosure may be used as a therapy for Alzheimer's Disease.

[1414] In some embodiments, an AAV particle (e.g., an AAV particle comprising an AAV capsid variant), e.g., a plurality of particles, of the present disclosure may be used as a therapy for Amyotrophic Lateral Sclerosis.

[1415] In some embodiments, an AAV particle (e.g., an AAV particle comprising an AAV capsid variant), e.g., a plurality of particles, of the present disclosure may be used as a therapy for Huntington's Disease.

[1416] In some embodiments, an AAV particle (e.g., an AAV particle comprising an AAV capsid variant), e.g., a plurality of particles, of the present disclosure may be used as a therapy for Parkinson's Disease.

[1417] In some embodiments, an AAV particle (e.g., an AAV particle comprising an AAV capsid variant), e.g., a plurality of particles, of the present disclosure may be used as a therapy for Gaucher disease (GD) (e.g., Type 1 GD, Type 2 GD, or Type 3 GD). In some embodiments, an AAV particle (e.g., an AAV particle comprising an AAV capsid variant), e.g., a plurality of particles, of the present disclosure may be used as a therapy for Parkinson's disease associated with a GBA mutation. In some embodiments, an AAV particle (e.g., an AAV particle comprising an AAV capsid variant), e.g., a plurality of particles, of the present disclosure may be used as a therapy for dementia with Lewy Bodies (DLB).

[1418] In some embodiments, an AAV particle (e.g., an AAV particle comprising an AAV capsid variant), e.g., a plurality of particles, of the present disclosure may be used as a therapy for spinal muscular atrophy.

[1419] In some embodiments, an AAV particle (e.g., an AAV particle comprising an AAV capsid variant), e.g., a plurality of particles, of the present disclosure may be used as a therapy for a leukodystrophy, e.g., Alexander disease, autosomal dominant leukodystrophy with autonomic diseases (ADLD), Canavan disease, cerebrotendinous xanthomatosis (CTX), metachromatic leukodystrophy (MLD), Pelizaeus-Merzbacher disease, or Refsum disease.

[1420] In some embodiments, an AAV particle (e.g., an AAV particle comprising an AAV capsid variant), e.g., a plurality of particles, of the present disclosure may be used as a therapy for chronic or neuropathic pain.

[1421] In some embodiments, an AAV particle (e.g., an AAV particle comprising an AAV capsid variant), e.g., a plurality of particles, of the present disclosure may be used as a therapy for a disease associated with expression of HER2, e.g., a disease associated with overexpression of HER2. In some embodiments, the AAV particle of the disclosure (e.g., an AAV particle comprising an AAV capsid variant) is useful for the treatment, prophylaxis, palliation or amelioration of a HER2-positive cancer. In some embodiments, the HER2-positive cancer is a HER2-positive solid tumor. Additionally, or alternatively, the HER2-positive cancer may be a locally advanced or metastatic HER2-positive cancer. In some instances, the HER2-positive cancer is a HER2-positive breast cancer or a HER2-positive gastric cancer. In some embodiments, the HER2-positive cancer is selected from the group consisting of a HER2-positive gastroesophageal junction cancer, a HER2-positive colorectal cancer, a HER2-positive lung cancer (e.g., a HER2-positive non-small cell lung carcinoma), a HER2-positive pancreatic cancer, a HER2-positive colorectal cancer, a HER2-positive bladder cancer, a HER2-positive salivary duct cancer, a HER2-positive ovarian cancer (e.g., a HER2-positive epithelial ovarian cancer), or a HER2-positive endometrial cancer. In some instances, the HER2-positive cancer is prostate cancer. In some embodiments, the HER2-positive cancer has metastasized to the central nervous system (CNS). In some instances, the metastasized HER2-cancer has formed CNS neoplasms.

[1422] In some embodiments, an AAV particle (e.g., an AAV particle comprising an AAV capsid variant) e.g., a plurality of particles, of the present disclosure may be used as a therapy for a neuro-oncological disorder. In some embodiments, the neuro-oncological disorder is a cancer of primary CNS origin (e.g., a cancer of a CNS cell and/or CNS tissue). In some embodiments, the neuro-oncological disorder is metastatic cancer in a CNS cell, CNS region, and/or a CNS tissue. Examples of primary CNS cancers could be gliomas (which may include glioblastoma (also known as glioblastoma multiforme), astrocytomas, oligodendrogliomas, and ependymomas, and mixed gliomas), meningiomas, medulloblastomas, neuromas, and primary CNS lymphoma (in the brain, spinal cord, or meninges), among others. Examples of metastatic cancers include those originating in another tissue or organ, e.g., breast, lung, lymphoma, leukemia, melanoma (skin cancer), colon, kidney, prostate, or other types that metastasize to brain.

[1423] In some embodiments, an AAV particle (e.g., an AAV particle comprising an AAV capsid variant), e.g., a plurality of particles, of the present disclosure may be used as a therapy for a muscular disorder or a neuromuscular disorder.

[1424] In some embodiments, an AAV particle (e.g., an AAV particle comprising an AAV capsid variant), e.g., a plurality of particles, of the present disclosure may be used as a therapy for a cardiac disease or heart disease and/or method of improving (e.g., enhancing) cardiac function in a subject. In some embodiments, the cardiac disease is a cardiomyopathy (e.g., arrhythmogenic right ventricular cardiomyopathy, dilated cardiomyopathy, or hypertrophic cardiomyopathy), congestive heart failure, tachycardia (e.g., catecholaminergic polymorphic ventricular tachycardia), ischemic heart disease, and/or myocardial infarction.

[1425] In some embodiments, administration of the AAV particle described herein (e.g., an AAV particle comprising an AAV capsid polypeptide, e.g., an AAV capsid variant) to a subject may increase target gene, mRNA, and/or protein levels in a subject, relative to a control, e.g., the gene, mRNA, and/or mRNA levels in the subject prior to receiving AAV particle. The target gene, mRNA, and/or protein levels may be increased by about 30%, 40%, 50%, 60%, 70%, 80%, 85%, 90%, 95% and 100%, or at least 20-30%, 20-40%, 20-50%, 20-60%, 20-70%, 20-80%, 20-90%, 20-95%, 20-100%, 30-40%, 30-50%, 30-60%, 30-70%, 30-80%, 30-90%, 30-95%, 30-100%, 40-50%, 40-60%, 40-70%, 40-80%, 40-90%, 40-95%, 40-100%, 50-60%, 50-70%, 50-80%, 50-90%, 50-95%, 50-100%, 60-70%, 60-80%, 60-90%, 60-95%, 60-100%, 70-80%, 70-90%, 70-95%, 70-100%, 80-90%, 80-95%, 80-100%, 90-95%, 90-100% or 95-100% in a subject such as, but not limited to, the CNS, a region of the CNS, or a specific cell of the CNS, or a muscle, a region of a muscle, or a cell of a muscle, of a subject. In some embodiments, cell of the CNS comprises an astrocyte, microglia, cortical neuron, hippocampal neuron, DRG and/or sympathetic neuron, sensory neuron, oligodendrocyte, motor neuron, or combination thereof. As a non-limiting example, the AAV particles may increase the gene, mRNA, and/or protein levels of a target protein by fold increases over baseline. In some embodiments, AAV particles lead to 5-6 times higher levels of a target gene, mRNA, or protein.

[1426] In some embodiments, administration of the AAV particle described herein (e.g., an AAV particle comprising an AAV capsid polypeptide, e.g., an AAV capsid variant), e.g., an AAV particle comprising a nucleic acid encoding a siRNA molecule or an antibody or antibody fragment, to a subject may decrease target gene, mRNA, and/or protein levels in a subject, relative to a control, e.g., the gene, mRNA, and/or mRNA levels in the subject prior to receiving AAV particle. The target gene, mRNA, and/or protein levels may be decreased by about 30%, 40%, 50%, 60%, 70%, 80%, 85%, 90%, 95% and 100%, or at least 20-30%, 20-40%, 20-50%, 20-60%, 20-70%, 20-80%, 20-90%, 20-95%, 20-100%, 30-40%, 30-50%, 30-60%, 30-70%, 30-80%, 30-90%, 30-95%, 30-100%, 40-50%, 40-60%, 40-70%, 40-80%, 40-90%, 40-95%, 40-100%, 50-60%, 50-70%, 50-80%, 50-90%, 50-95%, 50-100%, 60-70%, 60-80%, 60-90%, 60-95%, 60-100%, 70-80%, 70-90%, 70-95%, 70-100%, 80-90%, 80-95%, 80-100%, 90-95%, 90-100% or 95-100% in a subject such as, but not limited to, the CNS, a region of the CNS, or a specific cell of the CNS, or a muscle, a region of a muscle, or a cell of a muscle, of a subject. In some embodiments, cell of the CNS comprises an astrocyte, microglia, cortical neuron, hippocampal neuron, DRG and/or sympathetic neuron, sensory neuron, oligodendrocyte, motor neuron, or combination thereof. As a non-limiting example, the AAV particles may decrease the gene, mRNA, and/or protein levels of a target protein by fold decreases over baseline.

[1427] In some embodiments, the AAV particles of the present disclosure (e.g., an AAV particle comprising an AAV capsid polypeptide, e.g., an AAV capsid variant) may be used to increase target protein and reduce symptoms of neurological disease in a subject. In some embodiments, the AAV particles of the present disclosure (e.g., an AAV particle comprising an AAV capsid polypeptide, e.g., an AAV capsid variant) may be used to decrease target protein and reduce symptoms of neurological disease in a subject.

[1428] In some embodiments, the AAV particles of the present disclosure (e.g., an AAV particle comprising an AAV capsid polypeptide, e.g., an AAV capsid variant) may be used to reduce the decline of functional capacity and activities of daily living as measured by a standard evaluation system such as, but not limited to, the total functional capacity (TFC) scale.

[1429] In some embodiments, the AAV particles of the present disclosure (e.g., an AAV particle comprising an AAV capsid polypeptide, e.g., an AAV capsid variant) may be used to improve performance on any assessment used to measure symptoms of neurological disease. Such assessments include, but are not limited to ADAS-cog (Alzheimer Disease Assessment Scale-cognitive), MMSE (Mini-Mental State Examination), GDS (Geriatric Depression Scale), FAQ (Functional Activities Questionnaire), ADL (Activities of Daily Living), GPCOG (General Practitioner Assessment of Cognition), Mini-Cog, AMTS (Abbreviated Mental Test Score), Clock-drawing test, 6-CIT (6-item Cognitive Impairment Test), TYM (Test Your Memory), MoCa (Montreal Cognitive Assessment), ACE-R (Addenbrookes Cognitive Assessment), MIS (Memory Impairment Screen), BADLS (Bristol Activities of Daily Living Scale), Barthel Index, Functional Independence Measure, Instrumental Activities of Daily Living, IQCODE (Informant Questionnaire on Cognitive Decline in the Elderly), Neuropsychiatric Inventory, The Cohen-Mansfield Agitation Inventory, BEHAVE-AD, EuroQol, Short Form-36 and/or MBR Caregiver Strain Instrument, or any of the other tests as described in Sheehan B (Ther Adv Neurol Disord. 5 (6): 349-358 (2012)), the contents of which are herein incorporated by reference in their entirety.

[1430] In some embodiments, the present composition is administered as a solo therapeutic or as combination therapeutic for the treatment of a neurological disease/disorder or a neurodegenerative disorder, a muscular disorder or neuromuscular disorder, and/or a neuro-oncological disorder.

[1431] The AAV particles (e.g., an AAV particle comprising an AAV capsid variant) encoding the target protein may be used in combination with one or more other therapeutic agents. In some embodiments, compositions can be administered concurrently with, prior to, or subsequent to, additional therapeutic or medical procedures. In general, each agent will be administered at a dose and/or on a time schedule determined for that agent.

[1432] Therapeutic agents that may be used in combination with the AAV particles of the present disclosure (e.g., an AAV particle comprising an AAV capsid variant) can be small molecule compounds which are antioxidants, anti-inflammatory agents, anti-apoptosis agents, calcium regulators, anti-glutamatergic agents, structural protein inhibitors, compounds involved in muscle function, and compounds involved in metal ion regulation. As a non-limiting example, the combination therapy may be in combination with one or more neuroprotective agents such as small molecule compounds, growth factors and hormones which have been tested for their neuroprotective effect on motor neuron degeneration.

[1433] Compounds tested for treating neurological disease which may be used in combination with the AAV particles described herein include, but are not limited to, cholinesterase inhibitors (donepezil, rivastigmine, galantamine), NMDA receptor antagonists such as memantine, anti-psychotics, anti-depressants, anti-convulsants (e.g., sodium valproate and levetiracetam for myoclonus), secretase inhibitors, amyloid aggregation inhibitors, copper or zinc modulators, BACE inhibitors, inhibitors of tau aggregation, such as Methylene blue, phenothiazines, anthraquinones, n-phenylamines or rhodamines, microtubule stabilizers such as NAP, taxol or paclitaxel, kinase or phosphatase inhibitors such as those targeting GSK3β (lithium) or PP2A, immunization with Aβ peptides or tau phospho-epitopes, anti-tau or anti-amyloid antibodies, dopamine-depleting agents (e.g., tetrabenazine for chorea), benzodiazepines (e.g., clonazepam for myoclonus, chorea, dystonia, rigidity, and/or spasticity), amino acid precursors of dopamine (e.g., levodopa for rigidity), skeletal muscle relaxants (e.g., baclofen, tizanidine for rigidity and/or spasticity), inhibitors for acetylcholine release at the neuromuscular junction to cause muscle paralysis (e.g., botulinum toxin for bruxism and/or dystonia), atypical neuroleptics (e.g., olanzapine and quetiapine for psychosis and/or irritability, risperidone, sulpiride and haloperidol for psychosis, chorea and/or irritability, clozapine for treatment-resistant psychosis, aripiprazole for psychosis with prominent negative symptoms), selective serotonin reuptake inhibitors (SSRIs) (e.g., citalopram, fluoxetine, paroxetine, sertraline, mirtazapine, venlafaxine for depression, anxiety, obsessive compulsive behavior and/or irritability), hypnotics (e.g., xopiclone and/or zolpidem for altered sleep-wake cycle), anticonvulsants (e.g., sodium valproate and carbamazepine for mania or hypomania) and mood stabilizers (e.g., lithium for mania or hypomania).

[1434] Neurotrophic factors may be used in combination therapy with the AAV particles of the present disclosure (e.g., an AAV particle comprising an AAV capsid variant) for treating neurological disease. Generally, a neurotrophic factor is defined as a substance that promotes survival, growth, differentiation, proliferation and/or maturation of a neuron, or stimulates increased activity of a neuron. In some embodiments, the present methods further comprise delivery of one or more trophic factors into the subject in need of treatment. Trophic factors may include, but are not limited to, IGF-I, GDNF, BDNF, CTNF, VEGF, Colivelin, Xaliproden, Thyrotrophin-releasing hormone and ADNF, and variants thereof.

[1435] In one aspect, the AAV particle described herein (e.g., an AAV particle comprising an AAV capsid variant) may be co-administered with AAV particles expressing neurotrophic factors such as AAV-IGF-I (See e.g., Vincent et al., Neuromolecular medicine, 2004, 6, 79-85; the contents of which are incorporated herein by reference in their entirety) and AAV-GDNF (See e.g., Wang et al., J Neurosci., 2002, 22, 6920-6928; the contents of which are incorporated herein by reference in their entirety).

[1436] In some embodiments, administration of the AAV particles (e.g., an AAV particle comprising an AAV capsid variant) to a subject will modulate, e.g., increase or decrease, the expression of a target protein in a subject and the modulation, e.g., increase or decrease of the presence, level, activity, and/or expression of the target protein will reduce the effects and/or symptoms of a neurological disease/disorder or a neurodegenerative disorder, a muscular disorder or neuromuscular disorder, and/or a neuro-oncological disorder in a subject.

### Definitions

[1437] Unless defined otherwise, all technical and scientific terms used herein have the same meaning as commonly understood by one of ordinary skill in the art to which the invention pertains.

[1438] Articles such as “a,” “an,” and “the” may mean one or more than one unless indicated to the contrary or otherwise evident from the context. Claims or descriptions that include “or” between one or more members of a group are considered satisfied if one, more than one, or all of the group members are present in, employed in, or otherwise relevant to a given product or process unless indicated to the contrary or otherwise evident from the context. The disclosure includes embodiments in which exactly one member of the group is present in, employed in, or otherwise relevant to a given product or process. The disclosure includes embodiments in which more than one, or the entire group members are present in, employed in, or otherwise relevant to a given product or process.

[1439] It is also noted that the term “comprising” is intended to be open and permits but does not require the inclusion of additional elements or steps. When the term “comprising” is used herein, the term “consisting of” and “consisting essentially thereof” is thus also encompassed and disclosed.

[1440] Where ranges are given, endpoints are included. Furthermore, it is to be understood that unless otherwise indicated or otherwise evident from the context and understanding of one of ordinary skill in the art, values that are expressed as ranges can assume any specific value or subrange within the stated ranges in different embodiments of the disclosure, to the tenth of the unit of the lower limit of the range, unless the context clearly dictates otherwise.

[1441] Adeno-associated virus: As used herein, the term “adeno-associated virus” or “AAV” refers to members of the dependovirus genus or a variant, e.g., a functional variant, thereof. In some embodiments, the AAV is wildtype, or naturally occurring. In some embodiments, the AAV is recombinant.

[1442] AAV Particle: As used herein, an “AAV particle” refers to an AAV capsid, e.g., an AAV capsid variant, and a polynucleotide, e.g., a viral genome. In some embodiments, the viral genome of the AAV particle comprises at least one payload region and at least one ITR. In some embodiments, an AAV particle of the disclosure is an AAV particle comprising an AAV variant. In some embodiments, the AAV particle is capable of delivering a nucleic acid, e.g., a payload region, encoding a payload to cells, typically, mammalian, e.g., human, cells. In some embodiments, an AAV particle of the present disclosure may be produced recombinantly. In some embodiments, an AAV particle may be derived from any serotype, described herein or known in the art, including combinations of serotypes (e.g., “pseudotyped” AAV) or from various genomes (e.g., single stranded or self-complementary). In some embodiments, the AAV particle may be replication defective and/or targeted. It is to be understood that reference to the AAV particle of the disclosure also includes pharmaceutical compositions thereof, even if not explicitly recited.

[1443] Amelioration: As used herein, the term “amelioration” or “ameliorating” refers to a lessening of severity of at least one indicator of a condition or disease. For example, in the context of a neurodegeneration disorder, amelioration includes the reduction of neuron loss.

[1444] Antisense strand: As used herein, the term “the antisense strand” or “the first strand” or “the guide strand” of a siRNA molecule refers to a strand that is substantially complementary to a section of about 10-50 nucleotides, e.g., about 15-30, 16-25, 18-23 or 19-22 nucleotides of the mRNA of a gene targeted for silencing. The antisense strand or first strand has sequence sufficiently complementary to the desired target mRNA sequence to direct target-specific silencing, e.g., complementarity sufficient to trigger the destruction of the desired target mRNA by the RNAi machinery or process.

[1445] Approximately: As used herein, the term “approximately” or “about,” as applied to one or more values of interest, refers to a value that is similar to a stated reference value. When referring to a measurable value such as an amount, a temporal duration, and the like, the term is meant to encompass is meant to encompass variations of ±20% or in some instances ±10%, or in some instances ±5%, or in some instances ±1%, or in some instances ±0.1% from the specified value, as such variations are appropriate to perform the disclosed methods.

[1446] Capsid: As used herein, the term “capsid” refers to the exterior, e.g., a protein shell, of a virus particle, e.g., an AAV particle, that is substantially (e.g., >50%, >90%, or 100%) protein. In some embodiments, the capsid is an AAV capsid comprising an AAV capsid protein described herein, e.g., a VP1, VP2, and/or VP3 polypeptide. The AAV capsid protein can be a wild-type AAV capsid protein or a variant, e.g., a structural and/or functional variant from a wild-type or a reference capsid protein, referred to herein as an “AAV capsid variant.” In some embodiments, the AAV capsid variant described herein has the ability to enclose, e.g., encapsulate, a viral genome and/or is capable of entry into a cell, e.g., a mammalian cell. In some embodiments, the AAV capsid variant described herein may have modified tropism compared to that of a wild-type AAV capsid, e.g., the corresponding wild-type capsid.

[1447] Complementary and substantially complementary: As used herein, the term “complementary” refers to the ability of polynucleotides to form base pairs with one another. Base pairs are typically formed by hydrogen bonds between nucleotide units in antiparallel polynucleotide strands. Complementary polynucleotide strands can form base pairs in the Watson-Crick manner (e.g., A to T, A to U, C to G), or in any other manner that allows for the formation of duplexes. As persons skilled in the art are aware, when using RNA as opposed to DNA, uracil rather than thymine is the base that is considered to be complementary to adenine. However, when a U is denoted in the context of the present disclosure, the ability to substitute a T is implied, unless otherwise stated. Perfect complementarity or 100% complementarity refers to the situation in which each nucleotide unit of one polynucleotide strand can form a hydrogen bond with a nucleotide unit of a second polynucleotide strand. Less than perfect complementarity refers to the situation in which some, but not all, nucleotide units of two strands can form hydrogen bond with each other. For example, for two 20-mers, if only two base pairs on each strand can form a hydrogen bond with each other, the polynucleotide strands exhibit 10% complementarity. In the same example, if 18 base pairs on each strand can form hydrogen bonds with each other, the polynucleotide strands exhibit 90% complementarity. The term “complementary” as used herein can encompass fully complementary, partially complementary, or substantially complementary. As used herein, the term “substantially complementary” means that the siRNA has a sequence (e.g., in the antisense strand) which is sufficient to bind the desired target mRNA, and to trigger the RNA silencing of the target mRNA. “Fully complementary”, “perfect complementarity”, or “100% complementarity” refers to the situation in which each nucleotide unit of one polynucleotide or oligonucleotide strand can base-pair with a nucleotide unit of a second polynucleotide or oligonucleotide strand.

[1448] Encapsulate: As used herein, the term “encapsulate” means to enclose, surround or encase. As an example, a capsid protein, e.g., an AAV capsid variant, often encapsulates a viral genome. In some embodiments, encapsulate within a capsid, e.g., an AAV capsid variant, encompasses 100% coverage by a capsid, as well as less than 100% coverage, e.g., 95% or less. For example, gaps or discontinuities may be present in the capsid so long as the viral genome is retained in the capsid, e.g., prior to entry into a cell.

[1449] Effective Amount: As used herein, the term “effective amount” of an agent is that amount sufficient to effect beneficial or desired results, for example, clinical results, and, as such, an “effective amount” depends upon the context in which it is being applied. For example, in the context of administering an agent that treats cancer, an effective amount of an agent is, for example, an amount sufficient to achieve treatment, as defined herein, of cancer, as compared to the response obtained without administration of the agent.

[1450] Expression: As used herein, “expression” of a nucleic acid sequence refers to production of an RNA template from a DNA sequence (e.g., by transcription). In some embodiments, expression further comprises one or more of: (1) processing of an RNA transcript (e.g., by splicing, editing, 5′ cap formation, and/or 3′ end processing); (2) translation of an RNA into a polypeptide or protein; and (3) post-translational modification of a polypeptide or protein.

[1451] Fragment: A “fragment,” as used herein, refers to a portion. For example, an antibody fragment may comprise a CDR, or a heavy chain variable region, or a scFv, etc. In some embodiments, a fragment is a nucleic acid fragment.

[1452] Identity: As used herein, “identity” refers to the subunit sequence identity between two polymeric molecules, e.g., between two nucleic acid molecules, such as, two DNA molecules or two RNA molecules, or between two polypeptide molecules. When a subunit position in both of the two molecules is occupied by the same monomeric subunit; e.g., if a position in each of two DNA molecules is occupied by adenine, then they are identical at that position. The identity between two sequences is a direct function of the number of matching positions; e.g., if half (e.g., five positions in a polymer ten subunits in length) of the positions in two sequences are identical, the two sequences are 50% identical; if 90% of the positions (e.g., 9 of 10), are matched, the two sequences are 90% identical. Calculation of the percent identity of two polynucleotide sequences, for example, can be performed by aligning the two sequences for optimal comparison purposes (e.g., gaps can be introduced in one or both of a first and a second nucleic acid sequences for optimal alignment and non-identical sequences can be disregarded for comparison purposes). In certain embodiments, the length of a sequence aligned for comparison purposes is at least 30%, at least 40%, at least 50%, at least 60%, at least 70%, at least 80%, at least 90%, at least 95%, or 100% of the length of the reference sequence. The nucleotides at corresponding nucleotide positions are then compared. When a position in the first sequence is occupied by the same nucleotide as the corresponding position in the second sequence, then the molecules are identical at that position. The percent identity between the two sequences is a function of the number of identical positions shared by the sequences, taking into account the number of gaps, and the length of each gap, which needs to be introduced for optimal alignment of the two sequences. The comparison of sequences and determination of percent identity between two sequences can be accomplished using a mathematical algorithm. For example, the percent identity between two nucleotide sequences can be determined using methods such as those described in Computational Molecular Biology, Lesk, A. M., ed., Oxford University Press, New York, 1988; Biocomputing: Informatics and Genome Projects, Smith, D. W., ed., Academic Press, New York, 1993; Sequence Analysis in Molecular Biology, von Heinje, G., Academic Press, 1987; Computer Analysis of Sequence Data, Part I, Griffin, A. M., and Griffin, H. G., eds., Humana Press, New Jersey, 1994; and Sequence Analysis Primer, Gribskov, M. and Devereux, J., eds., M Stockton Press, New York, 1991; the contents of each of which are incorporated herein by reference in their entirety. For example, the percent identity between two nucleotide sequences can be determined using the algorithm of Meyers and Miller (CABIOS, 1989, 4:11-17), which has been incorporated into the ALIGN program (version 2.0) using a PAM120 weight residue table, a gap length penalty of 12 and a gap penalty of 4. The percent identity between two nucleotide sequences can, alternatively, be determined using the GAP program in the GCG software package using an NWSgapdna.CMP matrix. Methods commonly employed to determine percent identity between sequences include, but are not limited to those disclosed in Carillo, H., and Lipman, D., SIAM J Applied Math., 48:1073 (1988); incorporated herein by reference. Techniques for determining identity are codified in publicly available computer programs. Exemplary computer software to determine homology between two sequences include, but are not limited to, GCG program package, Devereux, J., et al., Nucleic Acids Research, 12 (1), 387 (1984)), BLASTP, BLASTN, and FASTA Altschul, S. F. et al., J. Molec. Biol., 215, 403 (1990)).

[1453] Inhibit expression of a gene: As used herein, the phrase “inhibit expression of a gene” means to cause a reduction in the amount of an expression product of the gene. The expression product can be an RNA transcribed from the gene (e.g., an mRNA) or a polypeptide translated from an mRNA transcribed from the gene. Typically, a reduction in the level of an mRNA results in a reduction in the level of a polypeptide translated therefrom. The level of expression may be determined using standard techniques for measuring mRNA or protein.

[1454] Isolated: As used herein, the term “isolated” refers to a substance or entity that is altered or removed from the natural state, e.g., altered or removed from at least some of the components with which it is associated in the natural state. For example, a nucleic acid or a peptide naturally present in a living animal is not “isolated,” but the same nucleic acid or peptide partially or completely separated from the coexisting materials of its natural state is “isolated.” An isolated nucleic acid or protein can exist in substantially purified form, or can exist in a non-native environment such as, for example, a host cell. Such polynucleotides could be part of a vector and/or such polynucleotides or polypeptides could be part of a composition, and still be isolated in that such vector or composition is not part of the environment in which it is found in nature. In some embodiments, an isolated nucleic acid is recombinant or may be incorporated into a vector.

[1455] Neurological disease: As used herein, a “neurological disease” is any disease associated with the central or peripheral nervous system and components thereof (e.g., neurons).

[1456] Orthogonal evolution: As used herein, the term “orthogonal evolution” refers to a method wherein AAV particles are administered for a first round of AAV selection as described herein across a set of any number of cell- and/or subject-types that may be from different species and/or strains, and wherein any number of additional, e.g., subsequent, AAV selection rounds are performed either across a set of any number of cell- and/or subject-types that may be from different species and/or strains, or across a set of any number of cell- and/or subject-types that may be from the same species and/or strain.

[1457] Payload region: As used herein, a “payload region” is any nucleic acid sequence (e.g., within the viral genome) which encodes one or more “payloads” of the disclosure. As non-limiting examples, a payload region may be a nucleic acid sequence within the viral genome of an AAV particle, which encodes a payload, wherein the payload is an RNAi agent or a polypeptide. Payloads of the present disclosure may be, but are not limited to, peptides, polypeptides, proteins, antibodies, RNAi agents, etc.

[1458] Polypeptide: As used herein, “polypeptide” means a polymer of amino acid residues (natural or unnatural) linked together most often by peptide bonds. The term, as used herein, refers to proteins, polypeptides, and peptides of any size, structure, or function. If the polypeptide is a peptide, it will be at least about 2, 3, 4, or at least 5 amino acid residues long. Thus, polypeptides include gene products, naturally occurring polypeptides, synthetic polypeptides, homologs, orthologs, paralogs, fragments and other equivalents, variants, and analogs of the foregoing. A polypeptide may be a single molecule or may be a multi-molecular complex such as a dimer, trimer or tetramer. They may also comprise single chain or multichain polypeptides and may be associated or linked. The term polypeptide may also apply to amino acid polymers in which one or more amino acid residues are an artificial chemical analogue of a corresponding naturally occurring amino acid.

[1459] Polypeptide variant: The term “polypeptide variant” refers to molecules which differ in their amino acid sequence from a native or reference sequence. The amino acid sequence variants may possess substitutions, deletions, and/or insertions at certain positions within the amino acid sequence, as compared to a native or reference sequence. In some embodiments, a variant comprises a sequence having at least about 50%, at least about 80%, or at least about 90%, identical (homologous) to a native or a reference sequence.

[1460] Peptide: As used herein, “peptide” is less than or equal to 50 amino acids long, e.g., about 5, 10, 15, 20, 25, 30, 35, 40, 45, or 50 amino acids long.

[1461] Pharmaceutically acceptable: The phrase “pharmaceutically acceptable” is employed herein to refer to those compounds, materials, compositions, and/or dosage forms which are, within the scope of sound medical judgment, suitable for use in contact with the tissues of human beings and animals without excessive toxicity, irritation, allergic response, or other problem or complication, commensurate with a reasonable benefit/risk ratio.

[1462] Preventing: As used herein, the term “preventing” or “prevention” refers to partially or completely delaying onset of an infection, disease, disorder and/or condition; partially or completely delaying onset of one or more symptoms, features, or clinical manifestations of a particular infection, disease, disorder, and/or condition; partially or completely delaying onset of one or more symptoms, features, or manifestations of a particular infection, disease, disorder, and/or condition; partially or completely delaying progression from an infection, a particular disease, disorder and/or condition; and/or decreasing the risk of developing pathology associated with the infection, the disease, disorder, and/or condition.

[1463] Region: As used herein, the term “region” refers to a zone or general area. In some embodiments, when referring to a protein or protein module, a region may comprise a linear sequence of amino acids along the protein or protein module or may comprise a three-dimensional area, an epitope and/or a cluster of epitopes. In some embodiments, regions comprise terminal regions. As used herein, the term “terminal region” refers to regions located at the ends or termini of a given agent. When referring to proteins, terminal regions may comprise N- and/or C-termini.

[1464] In some embodiments, when referring to a polynucleotide, a region may comprise a linear sequence of nucleic acids along the polynucleotide or may comprise a three-dimensional area, secondary structure, or tertiary structure. In some embodiments, regions comprise terminal regions. As used herein, the term “terminal region” refers to regions located at the ends or termini of a given agent. When referring to polynucleotides, terminal regions may comprise 5′ and/or 3′ termini.

[1465] RNA or RNA molecule: As used herein, the term “RNA” or “RNA molecule” or “ribonucleic acid molecule” refers to a polymer of ribonucleotides; the term “DNA” or “DNA molecule” or “deoxyribonucleic acid molecule” refers to a polymer of deoxyribonucleotides. DNA and RNA can be synthesized naturally, e.g., by DNA replication and transcription of DNA, respectively; or be chemically synthesized. DNA and RNA can be single-stranded (i.e., ssRNA or ssDNA, respectively) or multi-stranded (e.g., double stranded, i.e., dsRNA and dsDNA, respectively). The term “mRNA” or “messenger RNA”, as used herein, refers to a single stranded RNA that encodes the amino acid sequence of one or more polypeptide chains.

[1466] RNA interfering or RNAi: As used herein, the term “RNA interfering” or “RNAi” refers to a sequence specific regulatory mechanism mediated by RNA molecules which results in the inhibition or interfering or “silencing” of the expression of a corresponding protein-coding gene. RNAi has been observed in many types of organisms, including plants, animals and fungi. RNAi occurs in cells naturally to remove foreign RNAs (e.g., viral RNAs). Natural RNAi proceeds via fragments cleaved from free dsRNA which direct the degradative mechanism to other similar RNA sequences. RNAi is controlled by the RNA-induced silencing complex (RISC) and is initiated by short/small dsRNA molecules in cell cytoplasm, where they interact with the catalytic RISC component argonaute. The dsRNA molecules can be introduced into cells exogenously. Exogenous dsRNA initiates RNAi by activating the ribonuclease protein Dicer, which binds and cleaves dsRNAs to produce double-stranded fragments of 21-25 base pairs with a few unpaired overhang bases on each end. These short double stranded fragments are called small interfering RNAs (siRNAs).

[1467] RNAi agent: As used herein, the term “RNAi agent” refers to an RNA molecule, or its derivative, that can induce inhibition, interfering, or “silencing” of the expression of a target gene and/or its protein product. An RNAi agent may knock-out (virtually eliminate or eliminate) expression, or knock-down (lessen or decrease) expression. The RNAi agent may be, but is not limited to, dsRNA, siRNA, shRNA, pre-miRNA, pri-miRNA, miRNA, stRNA, lncRNA, piRNA, or snoRNA.

[1468] miR binding site: As used herein, a “miR binding site” comprises a nucleic acid sequence (whether RNA or DNA, e.g., differ by “U” of RNA or “T” in DNA) that is capable of binding, or binds, in whole or in part to a microRNA (miR), e.g., through complete or partial hybridization. Typically, such binding occurs between the miR and the miR binding site in the reverse complement orientation. In some embodiments, the miR binding site is transcribed from the AAV viral genome encoding the miR binding site.

[1469] In some embodiments, a miR binding site may be encoded or transcribed in series. Such a “miR binding site series” or “miR BSs” may include two or more miR binding sites having the same or different nucleic acid sequence.

[1470] Spacer: As used here, a “spacer” is generally any selected nucleic acid sequence of, e.g., 1, 2, 3, 4, 5, 6, 7, 8, 9, or 10 nucleotides in length, which is located between two or more consecutive miR binding site sequences. Spacers may also be more than 10 nucleotides in length, e.g., 20, 30, 40, or 50 or more than 50 nucleotides.

[1471] Sample: As used herein, the term “sample” or “biological sample” refers to a subset of its tissues, cells, nucleic acids, or component parts (e.g., body fluids, including but not limited to blood, serum, mucus, lymphatic fluid, synovial fluid, cerebrospinal fluid, saliva, amniotic fluid, amniotic cord blood, urine, vaginal fluid, and semen).

[1472] Self-complementary viral particle: As used herein, a “self-complementary viral particle” is a particle comprised of at least two components, a protein capsid and a self-complementary viral genome enclosed within the capsid.

[1473] Sense Strand: As used herein, the term “the sense strand” or “the second strand” or “the passenger strand” of a siRNA molecule refers to a strand that is complementary to the antisense strand or first strand. The antisense and sense strands of a siRNA molecule are hybridized to form a duplex structure. As used herein, a “siRNA duplex” includes a siRNA strand having sufficient complementarity to a section of about 10-50 nucleotides of the mRNA of the gene targeted for silencing and a siRNA strand having sufficient complementarity to form a duplex with the other siRNA strand.

[1474] Short interfering RNA or siRNA: As used herein, the terms “short interfering RNA,” “small interfering RNA” or “siRNA” refer to an RNA molecule (or RNA analog) comprising between about 5-60 nucleotides (or nucleotide analogs) which is capable of directing or mediating RNAi. Preferably, a siRNA molecule comprises between about 15-30 nucleotides or nucleotide analogs, such as between about 16-25 nucleotides (or nucleotide analogs), between about 18-23 nucleotides (or nucleotide analogs), between about 19-22 nucleotides (or nucleotide analogs) (e.g., 19, 20, 21 or 22 nucleotides or nucleotide analogs), between about 19-25 nucleotides (or nucleotide analogs), and between about 19-24 nucleotides (or nucleotide analogs). The term “short” siRNA refers to a siRNA comprising 5-23 nucleotides, preferably 21 nucleotides (or nucleotide analogs), for example, 19, 20, 21 or 22 nucleotides. The term “long” siRNA refers to a siRNA comprising 24-60 nucleotides, preferably about 24-25 nucleotides, for example, 23, 24, 25 or 26 nucleotides. Short siRNAs may, in some instances, include fewer than 19 nucleotides, e.g., 16, 17 or 18 nucleotides, or as few as 5 nucleotides, provided that the shorter siRNA retains the ability to mediate RNAi. Likewise, long siRNAs may, in some instances, include more than 26 nucleotides, e.g., 27, 28, 29, 30, 35, 40, 45, 50, 55, or even 60 nucleotides, provided that the longer siRNA retains the ability to mediate RNAi or translational repression absent further processing, e.g., enzymatic processing, to a short siRNA. siRNAs can be single stranded RNA molecules (ss-siRNAs) or double stranded RNA molecules (ds-siRNAs) comprising a sense strand and an antisense strand which hybridized to form a duplex structure called an siRNA duplex.

[1475] Subject: As used herein, the term “subject” or “patient” refers to any organism to which a composition in accordance with the disclosure may be administered, e.g., for experimental, diagnostic, prophylactic, and/or therapeutic purposes. Typical subjects include animals (e.g., mammals such as mice, rats, rabbits, non-human primates, and humans) and/or plants.

[1476] Target Cells: As used herein, “target cells” or “target tissue” refers to any one or more cells of interest. The cells may be found in vitro, in vivo, in situ or in the tissue or organ of an organism. The organism may be an animal, preferably a mammal, more preferably a human and most preferably a patient.

[1477] Therapeutic Agent: The term “therapeutic agent” refers to any agent that, when administered to a subject, has a therapeutic, diagnostic, and/or prophylactic effect and/or elicits a desired biological and/or pharmacological effect.

[1478] Therapeutically effective amount: As used herein, the term “therapeutically effective amount” means an amount of an agent to be delivered (e.g., nucleic acid, drug, therapeutic agent, diagnostic agent, prophylactic agent, etc.) that is sufficient, when administered to a subject suffering from or susceptible to an infection, disease, disorder, and/or condition, to treat, improve symptoms of, diagnose, prevent, and/or delay the onset of the infection, disease, disorder, and/or condition. In some embodiments, a therapeutically effective amount is provided in a single dose.

[1479] Treating: As used herein, the term “treating” refers to partially or completely alleviating, ameliorating, improving, relieving, delaying onset of, inhibiting progression of, reducing severity of, and/or reducing incidence of one or more symptoms or features of a particular infection, disease, disorder, and/or condition. For example, “treating” cancer may refer to inhibiting survival, growth, and/or spread of a tumor. Treatment may be administered to a subject who does not exhibit signs of a disease, disorder, and/or condition and/or to a subject who exhibits only early signs of a disease, disorder, and/or condition for the purpose of decreasing the risk of developing pathology associated with the disease, disorder, and/or condition.

[1480] Conservative amino acid substitution: As used herein, a “conservative amino acid substitution” is one in which the amino acid residue is replaced with an amino acid residue having a similar side chain. Families of amino acid residues having similar side chains have been defined in the art. These families include amino acids with basic side chains (e.g., lysine, arginine, histidine), acidic side chains (e.g., aspartic acid, glutamic acid), uncharged polar side chains (e.g., glycine, asparagine, glutamine, serine, threonine, tyrosine, cysteine), nonpolar side chains (e.g., alanine, valine, leucine, isoleucine, proline, phenylalanine, methionine, tryptophan), beta-branched side chains (e.g., threonine, valine, isoleucine) and aromatic side chains (e.g., tyrosine, phenylalanine, tryptophan, histidine).

[1481] Variant: As used herein, the term “variant” refers to a polypeptide or polynucleotide that has an amino acid or a nucleotide sequence that is substantially identical, e.g., having at least 70%, 75%, 80%, 85%, 90%, 95% or 99% sequence identity to a reference sequence. In some embodiments, the variant is a functional variant.

[1482] Functional Variant: As used herein, the term “functional variant” refers to a polypeptide variant or a polynucleotide variant that has at least one activity of the reference sequence.

[1483] Vector: As used herein, the term “vector” refers to any molecule or moiety which transports, transduces, or otherwise acts as a carrier of a heterologous molecule. In some embodiments, vectors may be plasmids. Vectors of the present disclosure may be produced recombinantly. The heterologous molecule may be a polynucleotide and/or a polypeptide.

[1484] Viral Genome: As used herein, the term “viral genome” refers to the nucleic acid sequence(s) encapsulated in an AAV particle. A viral genome comprises a nucleic acid sequence with at least one payload region encoding a payload and at least one ITR.

### Equivalents and Scope

[1485] The disclosures of each and every patent, patent application, and publication cited herein are hereby incorporated herein by reference in their entirety. Those skilled in the art will recognize or be able to ascertain using no more than routine experimentation, many equivalents to the specific embodiments in accordance with the disclosure described herein. The scope of the present disclosure is not intended to be limited to the above Description, but rather is as set forth in the appended claims.

[1486] In addition, it is to be understood that any particular embodiment of the present disclosure that falls within the prior art may be explicitly excluded from any one or more of the claims. Since such embodiments are deemed to be known to one of ordinary skill in the art, they may be excluded even if the exclusion is not set forth explicitly herein. Any particular embodiment of the compositions of the disclosure (e.g., any antibiotic, therapeutic or active ingredient; any method of production; any method of use; etc.) can be excluded from any one or more claims, for any reason, whether or not related to the existence of prior art.

[1487] It is to be understood that the words which have been used are words of description rather than limitation, and that changes may be made within the purview of the appended claims without departing from the true scope and spirit of the disclosure in its broader aspects.

[1488] While the present disclosure has been described at some length and with some particularity with respect to the several described embodiments, it is not intended that it should be limited to any such particulars or embodiments or any particular embodiment, but it is to be construed with references to the appended claims so as to provide the broadest possible interpretation of such claims in view of the prior art and, therefore, to effectively encompass the intended scope of the disclosure.

[1489] The present disclosure is further illustrated by the following non-limiting examples.

### EXAMPLES

### Example 1. High-Throughput Screen of TRACER AAV Library in NHP and Rats

[1490] A TRACER based method as described in WO 2020/072683, WO 2021/202651, and WO 2021/230987, the contents of which are herein incorporated by reference in their entirety, was used to generate the AAV capsid variants described herein. An orthogonal evolution approach was combined with high throughput screening by NGS. Briefly, the library of AAV capsid variants was generated using a mutagenesis approach, where sequences of 7 to 8 amino acids in length were inserted into different positions across loop VIII of AAV5, including between residues 570-584, relative to a reference sequence numbered according to SEQ ID NO: 138. The initial library was passed three times through non-human primates (NHP), specifically cynomolgus macaques (Macaca fascicularis), rats, or human brain microvascular endothelial cells (hBMVECs). Following the third passage in each system, 572 variants from the NHPs, 80 variants from the rats, and 99 variants from the hBMVECs were pooled into a passage 3 synthetic library of 747 total variants. This library was then passaged in NHPs and rats. After this passage (e.g., one-month post injection into two NHPs and the rats), RNA was extracted from three brain regions. Following RNA recovery and RT-PCR amplification, a systematic NGS enrichment analysis was performed to calculate fold enrichment relative to an AAV5 wild-type control in NHPs (Table 9, left column) and rats (Table 9, right column) and the peptides comprised within the variants were identified in both animals. Fold enrichment values above 1 indicate an increase in expression relative to AAV5. All libraries of AAV5 variants generated and passaged in the different hosts were under the control of the synapsin promoter.

[1491] As shown in Table 9, approximately 288 variants were identified with an average fold change greater than wild-type AAV5 in the brain of NHPs. Of the 288 NHP variants, 27 demonstrated a fold-change of greater than 5 compared to wild-type, with 1 variant demonstrating a fold change of greater than 60. For instance, the variant comprising YPAEVVQK (SEQ ID NO: 943) demonstrated a 64.9-fold enrichment in the brain of NHPs.

[1492] As shown in Table 9, approximately 98 variants were identified with an average fold change greater than wild-type AAV5 in the brain of rats. Of the 98 variants, 33 demonstrated a fold-change of greater than 2 compared to wild-type, with one variant demonstrating a fold change of greater than 40. For instance, the variant comprising YPAEVVQK (SEQ ID NO: 943) demonstrated a 41.1-fold enrichment in the brain of rats.

[1493] The variant comprising YPAEVVQK (SEQ ID NO: 943) which demonstrated a high fold enrichment in the brains of NHPs relative to wild-type AAV5 (64.9-fold enrichment), also demonstrated a high fold-change in the brains of rats (41.1-fold enrichment). This indicates that this AAV capsid variant comprising SEQ ID NO: 943 is able to cross species, as evidenced by increased expression and tropism in both the NHP and rat brain.

TABLE 9
NGS fold-enrichment of AAV capsid variants in NHPs and rats

| | SEQ | Fold enrichment | | SEQ | Fold enrichment |
|---|---|---|---|---|---|
| Peptide | ID | over AAV5 in the | Peptide | ID | over AAV5 in the |
| Sequence | NO: | brain of NHPs | Sequence | NO: | brain of Rats |
| YPAEVVQK | 943 | 64.910 | YPAEVVQK | 943 | 41.054 |
| RNQKVQGG | 202 | 23.240 | NHVVVISG | 432 | 25.930 |
| PDNRVKPV | 203 | 17.843 | TYAKDTSM | 659 | 16.868 |
| ARVEVSAG | 204 | 12.970 | TVLAQSTP | 547 | 7.098 |
| MLKRVITI | 205 | 10.323 | TFQTANKV | 235 | 6.518 |
| ESTHVELI | 206 | 10.126 | RAQTVSVK | 638 | 5.209 |
| GRVHVNMA | 207 | 9.652 | TMLNSAQQ | 666 | 4.636 |
| TSQSSTKS | 208 | 9.586 | RLAKVTQP | 223 | 4.558 |
| AKQVVKPP | 209 | 8.506 | TIPNKVTA | 779 | 3.480 |
| STMDVNKR | 210 | 8.284 | TPEATNHK | 271 | 3.471 |
| KKSQVANA | 211 | 8.264 | TTLSAKDR | 383 | 3.334 |
| TNAVSTKQ | 212 | 8.071 | PSPNVTKN | 295 | 3.285 |
| TLATHENM | 213 | 7.093 | TRPNPSPK | 850 | 3.255 |
| VKGKVSAG | 214 | 6.637 | TANSVKSQ | 319 | 3.003 |
| IRQKVPAS | 215 | 6.467 | SDNLVKHD | 664 | 2.973 |
| GRSEVLKG | 216 | 6.139 | LRGQVKSN | 248 | 2.932 |
| TPIKTAVR | 217 | 6.088 | TLKHSDLS | 264 | 2.904 |
| CKLQVDCQ | 218 | 5.842 | EVKMVSNV | 380 | 2.787 |
| TKLKPAGP | 219 | 5.830 | RNQKVQGG | 202 | 2.769 |
| NTMHVELR | 220 | 5.721 | RLVTVKSP | 332 | 2.690 |
| TKTKLSSP | 221 | 5.686 | IIAEVGKQ | 528 | 2.519 |
| DNMKVLGG | 222 | 5.585 | TKQMSDHG | 336 | 2.455 |
| RLAKVTQP | 223 | 5.454 | TIGGMKGK | 390 | 2.435 |
| GSNMVASK | 224 | 5.325 | SHSDVSVR | 776 | 2.383 |
| TMAPTKNP | 225 | 5.241 | TKTLQTSP | 631 | 2.364 |
| TAQHTTLS | 226 | 5.040 | VMSNVTQR | 483 | 2.216 |
| TQPSGKTQ | 227 | 5.024 | TKLSAVTK | 755 | 2.213 |
| MNSKVSSV | 228 | 4.985 | TLASHENI | 329 | 2.198 |
| TEATVKSN | 229 | 4.971 | TKLKPAGP | 219 | 2.161 |
| TSEIQGAK | 230 | 4.969 | TTAKPTVE | 516 | 2.133 |
| LSSNVTKA | 231 | 4.952 | TSEPPSTE | 930 | 2.078 |
| TPLCGMAL | 232 | 4.830 | ALNSVRRE | 781 | 2.053 |
| NNTAVSNK | 233 | 4.789 | LHNKVNDV | 680 | 2.014 |
| NKNRVRDL | 234 | 4.770 | LSSNVTKA | 231 | 1.953 |
| TFQTANKV | 235 | 4.669 | TSNAVRQQ | 765 | 1.948 |
| TTKQPKAL | 236 | 4.662 | QGANVVKQ | 320 | 1.901 |
| GSAEVKMR | 237 | 4.650 | KKPTVATI | 300 | 1.892 |
| SLLQVKLE | 238 | 4.515 | KMAGVARE | 615 | 1.872 |
| THAVSTKP | 239 | 4.431 | TMASQEHM | 661 | 1.857 |
| DINSVRRG | 240 | 4.425 | GGQGVNQS | 821 | 1.812 |
| QSKTVPAK | 241 | 4.181 | RPQKVSSA | 386 | 1.741 |
| TGKPDKSY | 242 | 4.163 | NLNIVRAP | 869 | 1.728 |
| TKIPSTSR | 243 | 4.055 | GMNSVRNA | 854 | 1.726 |
| TPAATNPK | 244 | 4.036 | LSSKVTDS | 1596 | 1.622 |
| TITKPPAP | 245 | 4.007 | NPTVVKSP | 303 | 1.576 |
| GRLIVTDG | 246 | 4.003 | NSPNVSRQ | 589 | 1.563 |
| TPKKSTSV | 247 | 3.994 | MLNEVSRR | 872 | 1.562 |
| LRGQVKSN | 248 | 3.979 | ITSSVARS | 891 | 1.561 |
| GLPDVIKQ | 249 | 3.920 | TKIPSTSR | 243 | 1.533 |
| TREQTSTA | 250 | 3.892 | TKVSGTPD | 267 | 1.516 |
| TRNGQPVN | 251 | 3.847 | ALDAVSNK | 283 | 1.514 |
| TRASLSIK | 252 | 3.807 | SRENVSRQ | 478 | 1.464 |
| SFSEVKNM | 253 | 3.748 | EAMMVDRK | 608 | 1.401 |
| TQSRSGGP | 254 | 3.666 | THTRIIAT | 784 | 1.397 |
| TSTPAVSQ | 255 | 3.650 | LSTKVSDQ | 721 | 1.396 |
| TASVPATS | 256 | 3.626 | TSSITPNP | 268 | 1.387 |
| TLASHENK | 257 | 3.600 | TATPSQSK | 335 | 1.373 |
| TQSSDHKV | 258 | 3.590 | RSKSVNPM | 327 | 1.367 |
| TLASQEHM | 259 | 3.590 | RYMTVKTQ | 2083 | 1.363 |
| TKGLPTQM | 260 | 3.581 | TTMSATSP | 324 | 1.354 |
| SSVVVDKM | 261 | 3.542 | TSTPAVSQ | 255 | 1.348 |
| TLDSHEHK | 262 | 3.516 | PLKNVPPG | 577 | 1.329 |
| TNQKVTGS | 263 | 3.511 | TPIKTAVR | 217 | 1.318 |
| TLKHSDLS | 264 | 3.463 | TNANQVTR | 691 | 1.296 |
| TTSTVSSP | 265 | 3.431 | TSSSPSNP | 354 | 1.280 |
| TKASHEHM | 266 | 3.359 | TNGATLGS | 705 | 1.261 |
| TKVSGTPD | 267 | 3.330 | KLLKVGSS | 316 | 1.249 |
| TSSITPNP | 268 | 3.328 | PSNNVKAL | 469 | 1.222 |
| AAETVKPN | 269 | 3.279 | TPLCGMAL | 232 | 1.213 |
| TNTQSKLS | 270 | 3.271 | YANSVKAM | 477 | 1.207 |
| TPEATNHK | 271 | 3.229 | KRLNVESR | 448 | 1.195 |
| TGGRNPGG | 272 | 3.227 | IKSGVQQK | 348 | 1.193 |
| TGGRVQGP | 273 | 3.224 | TTDLTTVE | 431 | 1.173 |
| KMSGVVGK | 274 | 3.194 | KPSKVGGV | 423 | 1.170 |
| KGGVVKTV | 275 | 3.190 | IKPPVPKA | 883 | 1.161 |
| TNGASSKL | 276 | 3.143 | PFQAVLGS | 604 | 1.160 |
| SSGDVKLW | 277 | 3.108 | SSPNVSRN | 284 | 1.135 |
| TSGTPNNF | 278 | 3.012 | NKLGVVTK | 439 | 1.130 |
| KRTTVSSP | 279 | 3.010 | KKSQVANA | 211 | 1.116 |
| TLASNENM | 280 | 2.997 | KEESVDTS | 886 | 1.110 |
| TKQKDLPR | 281 | 2.987 | TPVSVNTH | 967 | 1.098 |
| ATNVVSSK | 282 | 2.984 | TRETPSTE | 507 | 1.095 |
| ALDAVSNK | 283 | 2.971 | LGSNVSAR | 414 | 1.093 |
| SSPNVSRN | 284 | 2.955 | KAVSVDTS | 579 | 1.088 |
| THAASNKS | 285 | 2.933 | TPMSTSDL | 688 | 1.069 |
| TSSSTKSI | 286 | 2.925 | PVNVVRAS | 797 | 1.059 |
| EGKLVGTQ | 287 | 2.923 | VSGNVSRS | 677 | 1.047 |
| PNKLVGSV | 288 | 2.903 | AIEKVSVN | 498 | 1.046 |
| THASLPKP | 289 | 2.868 | TLGHSAKQ | 511 | 1.046 |
| TPGNSARS | 290 | 2.856 | QQDSVPGQ | 515 | 1.033 |
| TAPKVGNM | 291 | 2.846 | DNMKVLGG | 222 | 1.030 |
| TRALVKPP | 292 | 2.846 | TPGNSARS | 290 | 1.030 |
| GLEDVKGR | 293 | 2.823 | THAVTTKQ | 406 | 1.030 |
| QSEKVHMG | 294 | 2.812 | NCTVVQCR | 326 | 1.024 |
| PSPNVTKN | 295 | 2.783 | TSNRTTLQ | 561 | 1.013 |
| THAQSTKP | 296 | 2.736 | TITKPPAP | 245 | 1.010 |
| RPKTVSTF | 297 | 2.722 | TPTPPSAQ | 436 | 1.007 |
| EPSEVHKM | 298 | 2.720 | TLRTNESV | 801 | 1.000 |
| TNQKPTLQ | 299 | 2.665 | TTAPATGT | 489 | 1.000 |
| KKPTVATI | 300 | 2.661 | TTRAQTTK | 858 | 0.991 |
| TATVQSNP | 301 | 2.652 | KSRSVSGV | 896 | 0.977 |
| YQSDVPNR | 302 | 2.646 | TAGTTVTP | 463 | 0.976 |
| NPTVVKSP | 303 | 2.624 | WSNSVSTR | 546 | 0.961 |
| TVGSESRP | 304 | 2.595 | TGKLPSGQ | 391 | 0.960 |
| TSKSAAVR | 305 | 2.591 | NSNRVGGN | 313 | 0.957 |
| TLANHEHM | 30€ | 2.582 | TVSSPSGG | 709 | 0.955 |
| TLASHENM | 307 | 2.582 | DVASVSSK | 602 | 0.955 |
| RKPSVQTV | 308 | 2.574 | TQPSGKTQ | 227 | 0.944 |
| TGRDVPKL | 309 | 2.507 | IRQKVPAS | 215 | 0.939 |
| SQSSVKTP | 310 | 2.492 | DANSVKVV | 522 | 0.938 |
| ATSVVSQA | 311 | 2.477 | QAHRVPVE | 2082 | 0.932 |
| TGTKVESY | 312 | 2.474 | KRTTVSSP | 279 | 0.922 |
| NSNRVGGN | 313 | 2.470 | TSLQVSKI | 559 | 0.921 |
| TMTRVGDG | 314 | 2.455 | AGNSVRVS | 537 | 0.920 |
| NNGNVSAK | 315 | 2.413 | AKQVVKPP | 209 | 0.919 |
| KLLKVGSS | 316 | 2.402 | LAKTVNQT | 442 | 0.912 |
| SQPKVSTA | 317 | 2.402 | TPLDKRIR | 895 | 0.912 |
| MNDKVLTN | 318 | 2.395 | RQNKVTSG | 863 | 0.897 |
| TANSVKSQ | 319 | 2.373 | ARVEVSAG | 204 | 0.894 |
| QGANVVKQ | 320 | 2.367 | THAASNKS | 285 | 0.888 |
| TSSVSKQP | 321 | 2.363 | KMSGVVGK | 274 | 0.873 |
| SQGNVAKA | 322 | 2.354 | ISNMVRSS | 848 | 0.872 |
| IYVAVPAA | 323 | 2.324 | TTSTVSSP | 265 | 0.863 |
| TTMSATSP | 324 | 2.321 | TAVKSQMP | 339 | 0.844 |
| TFTATSNP | 325 | 2.315 | MNSKVSSV | 228 | 0.841 |
| NCTVVQCR | 326 | 2.289 | TSSSTKSI | 286 | 0.840 |
| RSKSVNPM | 327 | 2.267 | TAKILSTE | 2084 | 0.836 |
| GQVDVPKL | 328 | 2.266 | TDRNTPKL | 351 | 0.834 |
| TLASHENI | 329 | 2.266 | MVNVVHQS | 813 | 0.829 |
| THNSVRDR | 330 | 2.233 | TEATVKSN | 229 | 0.825 |
| GQSTVGQM | 331 | 2.231 | TSQSSTKS | 208 | 0.822 |
| RLVTVKSP | 332 | 2.229 | LVNAVKSF | 811 | 0.821 |
| THEVSTKQ | 333 | 2.218 | KIKVVNTP | 342 | 0.817 |
| TDKKQTTS | 334 | 2.208 | VLSEVKLQ | 640 | 0.810 |
| TATPSQSK | 335 | 2.206 | VKGKVSAG | 214 | 0.809 |
| TKQMSDHG | 336 | 2.109 | ATLSVSTN | 618 | 0.806 |
| TLASNEHK | 337 | 2.108 | VNSKVISD | 549 | 0.793 |
| NMS PVPKL | 338 | 2.106 | NAVGVAHG | 754 | 0.791 |
| TAVKSQMP | 339 | 2.100 | TSASKVSH | 357 | 0.788 |
| SNGAVGKH | 340 | 2.092 | AKDAVSGL | 617 | 0.788 |
| SNSKVNTG | 341 | 2.081 | TSGTVGTK | 447 | 0.787 |
| KIKVVNTP | 342 | 2.068 | TGLSVSTN | 636 | 0.777 |
| LLETVATK | 343 | 2.060 | MSNKVLRD | 532 | 0.777 |
| DSAKVMPQ | 344 | 2.045 | YMNSVKSF | 876 | 0.777 |
| TTKEVLSG | 345 | 2.042 | TLASNENM | 280 | 0.776 |
| ISSNVARG | 346 | 2.037 | ATNVVSSK | 282 | 0.769 |
| TGSTQSDL | 347 | 2.027 | TNQSGPGS | 922 | 0.766 |
| IKSGVQQK | 348 | 2.023 | QLNKVVIR | 479 | 0.758 |
| TATATQSK | 349 | 2.017 | LSNSVTPR | 509 | 0.754 |
| DGSQVHNR | 350 | 1.996 | TTKEVLSG | 345 | 0.748 |
| TDRNTPKL | 351 | 1.984 | TQSSDHKV | 258 | 0.741 |
| TTSGSPQP | 352 | 1.966 | YSNNVVKS | 672 | 0.740 |
| THEVSTKP | 353 | 1.958 | EGLKVLVG | 497 | 0.739 |
| TSSSPSNP | 354 | 1.933 | TTTSVNRP | 746 | 0.739 |
| LVAPVKQV | 355 | 1.924 | TDNRVRSY | 880 | 0.732 |
| LELLVPKL | 356 | 1.922 | TSSPGMKL | 753 | 0.731 |
| TSASKVSH | 357 | 1.903 | TTKQPKAL | 236 | 0.726 |
| LNAGVSSP | 358 | 1.901 | LGNRVSAL | 722 | 0.722 |
| TVTNGGKG | 359 | 1.886 | KLRQVNAI | 481 | 0.715 |
| TLGKVSLE | 360 | 1.879 | TMLSSAEV | 793 | 0.713 |
| NQEAVVKP | 361 | 1.874 | AVVGVGQA | 936 | 0.711 |
| AAMTVQKV | 362 | 1.851 | TTSKNRPD | 900 | 0.709 |
| KPQDVSSR | 363 | 1.843 | TKLNVTAS | 502 | 0.705 |
| YESKVQHT | 364 | 1.837 | TATSSHQQ | 627 | 0.703 |
| NMRGVEVK | 365 | 1.835 | TNMASSGK | 373 | 0.699 |
| TREKPSTA | 366 | 1.816 | PSSDVVSQ | 374 | 0.696 |
| VERSVTSN | 367 | 1.805 | IGPSVGTD | 606 | 0.693 |
| VGDLVHTG | 368 | 1.803 | TLPTPRQH | 620 | 0.692 |
| KNDHVSLS | 369 | 1.796 | STNTVRVN | 487 | 0.688 |
| SNEKVSMS | 370 | 1.793 | VGNRVTGN | 758 | 0.688 |
| TRRAQESP | 371 | 1.782 | NKNRVRDL | 234 | 0.687 |
| TTVKSDQS | 372 | 1.773 | TPEETNPK | 711 | 0.686 |
| TNMASSGK | 373 | 1.759 | YVSNVAKA | 499 | 0.680 |
| PSSDVVSQ | 374 | 1.757 | RSNKVRET | 467 | 0.668 |
| TLSSHENM | 375 | 1.755 | KSLDVSIS | 518 | 0.666 |
| TNPSMQSP | 376 | 1.741 | TPTPKNSH | 614 | 0.660 |
| GVSLVKTG | 377 | 1.703 | TSETPSTA | 486 | 0.648 |
| TPRNGAQP | 378 | 1.701 | TRALVKPP | 292 | 0.647 |
| TVSDKSMS | 379 | 1.689 | SNSKVNTG | 341 | 0.643 |
| EVKMVSNV | 380 | 1.678 | TLTQTVRD | 918 | 0.641 |
| VSAGVSKN | 381 | 1.676 | NNGNVSAK | 315 | 0.637 |
| LSKGVGHE | 382 | 1.673 | SRENVSRS | 445 | 0.636 |
| TTLSAKDR | 383 | 1.668 | ISNSVRQS | 745 | 0.630 |
| TMASHEHK | 384 | 1.639 | TLATQEHM | 433 | 0.629 |
| TKALTSGP | 385 | 1.638 | TDKQASGN | 495 | 0.629 |
| RPQKVSSA | 386 | 1.636 | THNSVRDR | 330 | 0.628 |
| TPQGVSSP | 387 | 1.601 | RSTGVHSD | 550 | 0.625 |
| TKGTTSSH | 388 | 1.590 | TTALHTEE | 849 | 0.624 |
| TMTSVVSP | 389 | 1.576 | TMASHEHK | 384 | 0.622 |
| TIGGMKGK | 390 | 1.564 | QRNLVKSA | 609 | 0.622 |
| TGKLPSGQ | 391 | 1.555 | QDSTVSKQ | 519 | 0.618 |
| AQDAVSAR | 392 | 1.551 | TSPNRNQS | 830 | 0.617 |
| TKVPSVSP | 393 | 1.551 | TGGRNPGG | 272 | 0.616 |
| DKGTVERR | 394 | 1.538 | KAATVQEP | 527 | 0.612 |
| SKLDVNQR | 395 | 1.538 | TKALTSGP | 385 | 0.611 |
| VSGKVVHQ | 396 | 1.528 | TSPLANKS | 496 | 0.609 |
| ASNKVGTL | 397 | 1.525 | SANKVKPD | 541 | 0.608 |
| TKPPGQQL | 398 | 1.523 | NNTAVSNK | 233 | 0.607 |
| TLASQEHK | 399 | 1.516 | HTNSVRTP | 599 | 0.599 |
| SIGKVGVG | 400 | 1.511 | GSNDVRNT | 628 | 0.598 |
| TRGASNSP | 401 | 1.510 | PSTGVVNP | 822 | 0.596 |
| TNAVSTKP | 402 | 1.492 | RKPSVQTV | 308 | 0.594 |
| TVSSSPGT | 403 | 1.481 | SQRGVSNP | 690 | 0.591 |
| KAETVDTS | 404 | 1.461 | YFTGVKSE | 979 | 0.581 |
| TLAYHEHK | 405 | 1.459 | PLVGVGSP | 716 | 0.581 |
| THAVTTKQ | 406 | 1.456 | TMRTAQSK | 2086 | 0.580 |
| TLATHEHK | 407 | 1.455 | HSNMVRNA | 844 | 0.578 |
| TSLNDARR | 408 | 1.445 | LNAGVSSP | 358 | 0.577 |
| TNVQSSGK | 409 | 1.433 | KPQDVSSR | 363 | 0.575 |
| APKPVMSG | 410 | 1.423 | SGNMVRAA | 795 | 0.573 |
| TSVSNPSK | 411 | 1.408 | TVQNSAST | 592 | 0.572 |
| TTSQTSAP | 412 | 1.390 | VLGSVSSN | 416 | 0.569 |
| TRQPSVTR | 413 | 1.388 | TPKKSTSV | 247 | 0.568 |
| LGSNVSAR | 414 | 1.379 | TGSTQSDL | 347 | 0.567 |
| TNPGVSNS | 415 | 1.378 | SANMVKHD | 675 | 0.566 |
| VLGSVSSN | 416 | 1.378 | GHRVVNNE | 712 | 0.566 |
| TLTSTGGN | 417 | 1.366 | SSSYVTVD | 491 | 0.565 |
| MIAKVRTE | 418 | 1.359 | GVSLVKTG | 377 | 0.564 |
| NGKQVSVH | 419 | 1.349 | GLPDVIKQ | 249 | 0.564 |
| TLLKSDRS | 420 | 1.348 | TTETASRG | 975 | 0.563 |
| TAGQVSSS | 421 | 1.343 | SQVVVSEK | 452 | 0.561 |
| TTMLAGGP | 422 | 1.320 | LRANVSSS | 626 | 0.560 |
| KPSKVGGV | 423 | 1.313 | LSSNVSRA | 462 | 0.559 |
| LSNNVRIK | 424 | 1.309 | GRLIVTDG | 246 | 0.558 |
| THAHVKLE | 425 | 1.308 | TTLSVSTP | 905 | 0.551 |
| VTKHVDLL | 426 | 1.306 | THSGVVIR | 2085 | 0.547 |
| SRAEVAQR | 427 | 1.301 | SITGVAKM | 752 | 0.547 |
| SCTNVASC | 428 | 1.292 | GGNLVRSV | 730 | 0.546 |
| TNSRKENI | 429 | 1.288 | SQGNVAKA | 322 | 0.542 |
| QQVSVPGP | 430 | 1.278 | NTDAVNQA | 2081 | 0.541 |
| TTDLTTVE | 431 | 1.271 | SKLDVNQR | 395 | 0.536 |
| NHVVVISG | 432 | 1.254 | THTTIKSP | 446 | 0.536 |
| TLATQEHM | 433 | 1.246 | GGGKVTDT | 583 | 0.535 |
| TPRSKPSP | 434 | 1.238 | TVNTTRMA | 867 | 0.534 |
| TTRKPQTT | 435 | 1.229 | TTSGSPQP | 352 | 0.534 |
| TPTPPSAQ | 436 | 1.225 | HLSNVSKV | 504 | 0.529 |
| TQKPHPQG | 437 | 1.213 | TTPANSRV | 538 | 0.526 |
| TQLSMKAN | 438 | 1.203 | TLATHEHK | 407 | 0.522 |
| NKLGVVTK | 439 | 1.202 | SSKEVSRV | 749 | 0.517 |
| NQTDVPPR | 440 | 1.200 | HYSKVADP | 695 | 0.515 |
| THAETTKP | 441 | 1.186 | TFTATSNP | 325 | 0.515 |
| LAKTVNQT | 442 | 1.185 | TSVDKARV | 492 | 0.514 |
| TRPGVSDR | 443 | 1.182 | STNAVRSS | 842 | 0.512 |
| LMNRVTQY | 444 | 1.181 | KQRQVSVQ | 747 | 0.511 |
| SRENVSRS | 445 | 1.177 | RKTGVMSS | 748 | 0.504 |
| THTTIKSP | 446 | 1.171 | NHTTVGER | 521 | 0.501 |
| TSGTVGTK | 447 | 1.165 | LPSQVVKT | 720 | 0.499 |
| KRLNVESR | 448 | 1.164 | SGTTVDSM | 454 | 0.499 |
| TMAPPGKI | 449 | 1.162 | TRQPSVTR | 413 | 0.497 |
| TVHKASMQ | 450 | 1.153 | ANLKVIVK | 723 | 0.492 |
| TATASQTK | 451 | 1.153 | SGTEVASL | 799 | 0.491 |
| SQVVVSEK | 452 | 1.149 | TNGASSKL | 276 | 0.490 |
| GTATVTTR | 453 | 1.147 | DINSVRRG | 240 | 0.487 |
| SGTTVDSM | 454 | 1.144 | TKGTTSSH | 388 | 0.481 |
| ASTVVLEK | 455 | 1.143 | TERASSSL | 694 | 0.481 |
| TASATQTK | 456 | 1.141 | ADTRVSNP | 544 | 0.480 |
| SVLAVNKS | 457 | 1.138 | EPSEVHKM | 298 | 0.477 |
| SANLVKND | 458 | 1.134 | PDNRVKPV | 203 | 0.477 |
| RDAQVPKL | 459 | 1.129 | RGKAVANN | 501 | 0.477 |
| PQRAVQEV | 460 | 1.124 | TRGASNSP | 401 | 0.476 |
| TGKSPDQN | 461 | 1.123 | TAVVVNSV | 578 | 0.475 |
| LSSNVSRA | 462 | 1.122 | SLKSVSLD | 630 | 0.474 |
| TAGTTVTP | 463 | 1.117 | TMNPSRNP | 707 | 0.471 |
| TGSSPTGS | 464 | 1.115 | KSRNVPTL | 653 | 0.467 |
| KRNEVISK | 465 | 1.112 | TRASLSIK | 252 | 0.467 |
| TLASHEHK | 466 | 1.105 | SGSKVPTL | 505 | 0.464 |
| RSNKVRET | 467 | 1.101 | STLDVARR | 710 | 0.462 |
| TSEKIQVM | 468 | 1.100 | THAESTKQ | 762 | 0.462 |
| PSNNVKAL | 469 | 1.098 | VERSVTSN | 367 | 0.457 |
| TLATLSTV | 470 | 1.098 | KFAAVPGI | 1595 | 0.453 |
| THLTPKGN | 471 | 1.097 | TLATHENM | 213 | 0.450 |
| TPASVKGT | 472 | 1.091 | TSTRSSGN | 731 | 0.449 |
| TPGTPSAG | 473 | 1.091 | TREKPSTA | 366 | 0.447 |
| RKNTVVNS | 474 | 1.090 | ILSNVSSR | 670 | 0.447 |
| PQKSVSNL | 475 | 1.088 | TLTKTTMG | 555 | 0.447 |
| TRLSSSGS | 476 | 1.083 | TTRKPQTT | 435 | 0.446 |
| YANSVKAM | 477 | 1.074 | FLNAVRGN | 717 | 0.443 |
| SRENVSRQ | 478 | 1.067 | SVLAVNKS | 457 | 0.442 |
| QLNKVVIR | 479 | 1.046 | AAMTVQKV | 362 | 0.440 |
| TVKEKGMQ | 480 | 1.043 | TSNSVRLG | 612 | 0.440 |
| KLRQVNAI | 481 | 1.039 | TVSSSPGT | 403 | 0.434 |
| NASMVANK | 482 | 1.038 | ANTNVTRP | 847 | 0.428 |
| VMSNVTQR | 483 | 1.026 | TPEPPTTA | 929 | 0.426 |
| GSGSVSKA | 484 | 1.025 | LSNNVRIK | 424 | 0.426 |
| TAVKVDHS | 485 | 1.025 | TTAMHTVE | 713 | 0.424 |
| TSETPSTA | 486 | 1.015 | SKLVVSDR | 585 | 0.423 |
| STNTVRVN | 487 | 1.009 | LLNKVPLN | 928 | 0.422 |
| LSNQVSAR | 488 | 1.005 | SQPKVSTA | 317 | 0.419 |
| TTAPATGT | 489 | 1.000 | RKQAVSVA | 887 | 0.419 |
| TVLQKSTG | 490 | 0.993 | TVSDKSMS | 379 | 0.415 |
| SSSYVTVD | 491 | 0.982 | SGLNVTTR | 798 | 0.415 |
| TSVDKARV | 492 | 0.978 | TGSSPTGS | 464 | 0.409 |
| RRATVTTP | 493 | 0.978 | TREQTSTA | 250 | 0.408 |
| TGGRTPGG | 494 | 0.971 | MPNTVRAH | 852 | 0.408 |
| TDKQASGN | 495 | 0.969 | SSGDVKLW | 277 | 0.406 |
| TSPLANKS | 496 | 0.963 | VNNRVHQS | 581 | 0.404 |
| EGLKVLVG | 497 | 0.949 | SDNLVKTD | 774 | 0.403 |
| AIEKVSVN | 498 | 0.943 | TSPNRVSY | 864 | 0.401 |
| YVSNVAKA | 499 | 0.942 | LGNRVSST | 807 | 0.399 |

[1494] Taken together, these results demonstrate that after 3 rounds of screening of this AAV5 variant library with loop VIII modifications in NHP and rats, many AAV capsid variants outperformed the wild-type AAV5, for example, in penetration of the blood brain barrier (BBB) and expression in the brain. Also, capsid variants were identified that could infect both rats and NHPs, indicating cross-species tropism and compatibility.

### Example 2. Individual Capsid Characterization in NHPs, Rats, and Mice

[1495] This Example describes the transduction level, tropism, ability to cross the blood brain barrier, and overall spatial distribution in the central nervous system (CNS) of an AAV capsid variant selected from the study described in Example 1, relative to wild-type AAV5, following intravenous injection in cynomolgus macaques (Macaca fascicularis), Norway rats, and BALB/c mice. The capsid variant was TTN-002 (SEQ ID NO: 982 (amino acid) and 984 (DNA), comprising SEQ ID NO: 943 (encoded by SEQ ID NO: 944)), as outlined in Table 3 above. The amino acid and DNA sequence of TTN-002 is provided, e.g., in Tables 4 and 5, respectively.

[1496] AAV particles were generated with this capsid variant encapsulating a luciferase-EGFP transgene or a payload-HA tag driven by a heterologous constitutive promoter. Each capsid variant and control AAV5 and/or AAV9 capsids were tested by intravenously administering the AAV particle formulation at 5e13 VG/kg to NHPs (n=2), 1e13 VG per rat (n=3; 3e13 VG/kg), and/or 5e11 VG per mouse (n=3; 2e13 VG/kg). The in-life period was 28 days for NHPs and mice, and 25 days for rats. Various CNS and peripheral tissues were then collected for measuring transgene mRNA, transgene protein, and/or viral DNA (biodistribution). The AAV particles administered to the NHPs and rats comprised self-complementary viral genomes and the AAV particles administered to mice comprised a single-stranded viral genome.

### A. Individual Capsid Characterization in NHPs

[1497] The brains, spinal cord, and peripheral tissues including the heart, liver, and quadriceps, were isolated from NHPs (cynomolgus macaques (Macaca fascicularis)) at 28 days post intravenous administration of the AAV particles comprising the TTN-002 capsid variant and were assayed by qPCR for the presence of transgene RNA as a measure of transgene expression and compared to the AAV9 control. Data were provided as average mRNA fold change for the transgene relative to a housekeeping gene as well as the fold change relative to the AAV9 control (Table 10). As shown in Table 10, mRNA transgene expression from the TTN-002 capsid variant, which is an AAV5 capsid variant, was significantly higher in the brain of NHPs relative to the wild-type AAV9 control. More specifically, mRNA expression was approximately 20-25-fold higher from the TTN-002 capsid variant compared to wild-type AAV9 in the brain of NHPs. Additionally, mRNA expression was approximately 4-5-fold higher from the TTN-002 capsid variants compared to wild-type AAV9 in the spinal cord of the NHPs. TTN-002 also demonstrated lower mRNA expression in the liver and DRG relative the AAV9 control (Table 10).

[1498] The brains, spinal cord, and peripheral tissues isolated from the NHPs were also assayed for the presence of viral DNA as a measure of viral genome levels. Data are provided in Table 11 as average DNA (viral genome (VG)) copies per diploid genome as well as fold change relative to the AAV9 control. As shown in Table 11, biodistribution of the AAV5 capsid variant, TTN-002, was significantly higher in the NHP brain relative to the wild-type AAV9 control. Biodistribution of TTN-002 was lower in the NHP liver relative to the wild-type AAV9 control.

[1499] The brain tissues and spinal cords of the NHPs were also subjected to immunohistochemistry staining to evaluate overall CNS tropism and biodistribution in various regions (FIGS. 1A-1D). Immunohistochemical staining correlated with the qPCR analysis, as TTN-002 showed significantly stronger staining and payload expression in the brain (e.g., across the entire cerebrum and cerebellum, FIG. 1A-1C) and spinal cord (FIGS. 1A and 1D), as compared to the AAV9 control. More specifically, TTN-002 demonstrated localization, strong payload expression, and transduction in both neurons and glial cells in the temporal cortex, perirhinal cortex, globus pallidus, putamen, caudate, thalamus, hippocampus, geniculate nucleus, Purkinje Layer, deep cerebellar nuclei, dentate nucleus, brainstem, and cerebellum (FIGS. 1A-1C). Payload expression was also observed in astrocytes in the dentate nucleus. Additionally, quantification of co-expression of the payload and the pan-neuronal marker SMI-311 showed payload expression in approximately 73.4% of the large neurons in the dentate nucleus of the deep cerebral nucleus in the cerebellum at 28-days post intravenous administration the AAV particles comprising the TTN-002 capsid variant. In the spinal cord, TTN-002 demonstrated localization, strong payload expression, and transduction in the cervical region (e.g., C2), thoracic region (e.g., T10), and lumbar region (e.g., L2) (FIGS. 1A and 1D). Additionally, TTN-002 showed less staining in the DRG relative to the wild-type AAV9 control (approximately 2-fold less) (FIG. 1D). Both TTN-002 and AAV9 appeared to transduce the liver and heart with similarly high efficiency, by IHC analysis (FIG. 1D). Additionally, the histopathology of these samples isolated from the NHPs showed no signs of toxicity in the NHPs, following intravenous administration of AAV particles comprising the TTN-002 capsid variant at a dose of 5e13 VG/kg with a self-complementary viral genome.

TABLE 10
Transgene mRNA expression with the
TTN-002 capsid variant in NHPs

| | | AVG transgene | | | Fold |
|---|---|---|---|---|---|
| | | mRNA fold change | | | change |
| Capsid | | relative to housekeeping gene | | | relative |
| Variant | Tissue | NHP1 | NHP2 | Average | to AAV9 |
| AAV9 | Cortex | 0.219 | 0.018 | 0.118 | 1.0 |
| | Thalamus | 0.141 | 0.090 | 0.116 | 1.0 |
| | Cerebellum | 0.677 | 0.098 | 0.388 | 1.0 |
| | SC Cervical | 0.610 | 2.040 | 1.325 | 1.0 |
| | SC Thoracic | 0.796 | 1.238 | 1.017 | 1.0 |
| | SC Lumbar | 4.950 | 0.890 | 2.920 | 1.0 |
| | DRG Cervical | 32.413 | 63.331 | 47.872 | 1.0 |
| | DRG Thoracic | 27.509 | 57.666 | 42.588 | 1.0 |
| | DRG Lumbar | 115.851 | 69.920 | 92.885 | 1.0 |
| | Liver | 21.591 | 9.198 | 15.394 | 1.0 |
| | Heart | 231.804 | 20.067 | 125.936 | 1.0 |
| | Quadriceps | 37.732 | 3.686 | 20.709 | 1.0 |
| TTN- | Cortex | 1.277 | 4.632 | 2.954 | 24.932 |
| 002 | Thalamus | 3.618 | 1.194 | 2.406 | 20.818 |
| | Cerebellum | 3.839 | 14.762 | 9.301 | 23.998 |
| | SC Cervical | 3.683 | 9.095 | 6.389 | 4.822 |
| | SC Thoracic | 5.759 | 6.639 | 6.199 | 6.096 |
| | SC Lumbar | 7.544 | 16.550 | 12.047 | 4.126 |
| | DRG Cervical | 31.162 | 22.002 | 26.582 | 0.555 |
| | DRG Thoracic | 25.228 | 14.915 | 20.071 | 0.471 |
| | DRG Lumbar | 39.386 | 16.611 | 27.998 | 0.301 |
| | Liver | 13.599 | 16.140 | 14.869 | 0.966 |
| | Heart | 380.487 | 143.202 | 261.844 | 2.079 |
| | Quadriceps | 45.659 | 4.207 | 24.933 | 1.204 |

TABLE 11
Viral DNA biodistribution with the TTN-002 capsid variant in NHPs

| | | AVG DNA copies | | | Fold |
|---|---|---|---|---|---|
| | | | | | change |
| Capsid | | per diploid genome | | | relative to |
| Variant | Tissue | NHP1 | NHP2 | Average | AAV9 |
| AAV9 | Cortex | 0.213 | 0.074 | 0.1435 | 1.0 |
| | Thalamus | 0.225 | 0.107 | 0.166 | 1.0 |
| | Cerebellum | 0.199 | 0.079 | 0.139 | 1.0 |
| | SC Cervical | 0.688 | 0.103 | 0.396 | 1.0 |
| | SC Thoracic | 0.385 | 0.192 | 0.288 | 1.0 |
| | SC Lumbar | 0.214 | 0.21 | 0.212 | 1.0 |
| | DRG Cervical | 0.320 | 0.32 | 0.320 | 1.0 |
| | DRG Thoracic | 0.303 | 0.733 | 0.518 | 1.0 |
| | DRG Lumbar | 0.240 | 0.246 | 0.243 | 1.0 |
| | Liver | 274.545 | 268.553 | 271.549 | 1.0 |
| | Heart | 2.367 | 2.833 | 2.600 | 1.0 |
| | Quadriceps | 1.380 | 0.768 | 1.074 | 1.0 |
| TTN- | Cortex | 0.600 | 0.031 | 0.3155 | 2.203734 |
| 002 | Thalamus | 0.388 | 0.417 | 0.402 | 2.425078 |
| | Cerebellum | 0.492 | 0.886 | 0.689 | 4.95212 |
| | SC Cervical | 0.008 | 0.298 | 0.153 | 0.386545 |
| | SC Thoracic | 0.679 | 0.481 | 0.580 | 2.010803 |
| | SC Lumbar | 0.801 | 0.194 | 0.497 | 2.347401 |
| | DRG Cervical | 0.711 | 0.636 | 0.674 | 2.106828 |
| | DRG Thoracic | 0.000 | 0.305 | 0.153 | 0.294746 |
| | DRG Lumbar | 0.356 | 0.517 | 0.437 | 1.795147 |
| | Liver | 21.177 | 156.337 | 88.757 | 0.326855 |
| | Heart | 2.078 | 2.380 | 2.229 | 0.857412 |
| | Quadriceps | 0.641 | 0.486 | 0.564 | 0.524939 |

### B. Individual Capsid Characterization in Rats

[1500] The brains and spinal cords were isolated from rats at 25 days post intravenous administration of AAV particles comprising the TTN-002 capsid variant (AAV5 variant) and assayed for the presence of transgene RNA as a measure of transgene expression, relative to a wild-type AAV5 control capsid or a wild-type AAV9 control capsid (Table 12). Data were provided as average mRNA fold change for the transgene relative to a housekeeping gene as well as the fold change relative to the AAV5 and AAV9 controls (Table 12). As shown in Table 12, mRNA transgene expression from the TTN-002 capsid variant was higher in both the brains and spinal cords relative to the AAV5 and AAV9 controls. More specifically, transgene mRNA expression was approximately 40-67-fold higher from the TTN-002 variant in the rat brain and spinal cord regions (cervical, thoracic and lumbar) compared to wild-type AAV5 and transgene mRNA expression was approximately 5-7-fold higher in the rat brain and spinal cord regions (cervical, thoracic and lumbar) compared to wild-type AAV9.

[1501] The brain and spinal cord tissues, as well as the heart peripheral tissue were subject to immunohistochemistry staining to evaluate overall tropism and biodistribution. Immunohistochemical staining correlated with the qPCR analysis, as TTN-002 showed increased staining relative to both AAV9 and AAV5 in the cortex, hippocampus, cerebellum, and spinal cord of the rat. TTN-002 showed increased staining in the heart of the rat relative to AAV5 but decreased staining relative to AAV9.

TABLE 12
Transgene mRNA expression with TTN-002 capsid variant in rats

| | AVG (n = 3 rats) transgene | | | Fold change in mRNA | | Fold change in mRNA | |
|---|---|---|---|---|---|---|---|
| | mRNA fold change relative to | | | expression relative to | | expression relative to | |
| | housekeeping gene | | | AAV5 | | AAV9 | |
| Tissue | AAV5 | AAV9 | TTN-002 | AAV9 | TTN-002 | AAV5 | TTN-002 |
| Brain | 0.051 | 0.381 | 2.051 | 7.533 | 40.510 | 0.133 | 5.378 |
| Spinal cord C1 | 0.121 | 1.045 | 8.209 | 8.629 | 67.796 | 0.116 | 7.856 |
| Spinal cord L1 | 0.118 | 1.647 | 4.901 | 13.947 | 41.499 | 0.072 | 2.975 |
| Spinal cord T1 | 0.133 | 1.066 | 6.952 | 8.015 | 52.291 | 0.125 | 6.524 |

### C. Individual Capsid Characterization in Mice

[1502] The brains and livers were isolated from BALB/c mice 28 days post intravenous injection of following intravenous administration of AAV particles comprising the TTN-002 capsid variant and were assayed by qPCR for the presence of transgene RNA as a measure of transgene expression and compared to an AAV9 and AAV5 control. Data were provided as average mRNA fold change for the transgene relative to a housekeeping gene (Table 13) and as fold change in transgene mRNA expression relative AAV9 and AAV5 controls (Table 14). As shown in Table 13 and Table 14, the AAV5 capsid variant TTN-002 demonstrated similar levels of transgene expression relative to AAV9 in the brain and higher expression than wild-type AAV5. Transgene mRNA expression in the mouse brain was 265.9-fold higher with the TTN-002 capsid variant as compared to wild-type AAV5 (Table 14). Additionally, wild-type AAV5 and the AAV5 capsid variant, TTN-002 both resulted in lower transgene expression in the liver, as compared to wild-type AAV9.

[1503] The brains and livers isolated from the mice were also assayed for the presence of viral DNA as a measure of viral genome levels. Data are provided in Table 13 as average DNA (viral genome (VG)) copies per diploid genome and in Table 14 as fold change in DNA copies per diploid genome relative AAV9 and AAV5 controls. The AAV5 capsid variant TTN-002 demonstrated comparable biodistribution relative to AAV9 in the mouse brain and increased biodistribution and viral genome levels than wild-type AAV5. More specifically, in the brain, the TTN-002 capsid variant led to 9-fold higher DNA (viral genome (VG)) copies per diploid genome relative to the AAV5 control (Table 14). Furthermore, wild-type AAV5 and the AAV5 capsid variant, TTN-002 resulted in decreased biodistribution and DNA (viral genome (VG)) copies per diploid genome in the liver relative to AAV9 (Table 14).

TABLE 13
Transgene mRNA expression with the
TTN-002 capsid variant in mice

| | | | AVG transgene | AVG |
|---|---|---|---|---|
| | | | mRNA fold change | Transgene |
| | Capsid | | relative to | DNA per |
| Tissue | Variant | Mouse | housekeeping gene | diploid genome |
| Brain | AAV5 | Mouse 1 | 0.002 | 0.0152 |
| | | Mouse 2 | 0.004 | 0.0000 |
| | | Mouse 3 | 0.004 | 0.0114 |
| | | Average | 0.003 | 0.0089 |
| | AAV9 | Mouse 1 | 0.553 | 0.2000 |
| | | Mouse 2 | 0.235 | 0.1027 |
| | | Mouse 3 | 0.844 | 0.1213 |
| | | Average | 0.544 | 0.1414 |
| | TTN-002 | Mouse 1 | 0.179 | 0.1334 |
| | | Mouse 2 | 0.462 | 0.0555 |
| | | Mouse 3 | 1.828 | 0.0608 |
| | | Average | 0.823 | 0.0832 |
| Liver | AAV5 | Mouse 1 | 0.395 | 0.9669 |
| | | Mouse 2 | 0.566 | 1.4158 |
| | | Mouse 3 | 0.882 | 1.4627 |
| | | Average | 0.614 | 1.2818 |
| | AAV9 | Mouse 1 | 9.164 | 34.1673 |
| | | Mouse 2 | 12.460 | 38.4415 |
| | | Mouse 3 | 5.190 | 24.0644 |
| | | Average | 8.938 | 32.2244 |
| | TTN-002 | Mouse 1 | 1.106 | 1.8292 |
| | | Mouse 2 | 1.305 | 1.6726 |
| | | Mouse 3 | 2.292 | 2.8985 |
| | | Average | 1.568 | 2.1334 |

TABLE 14
Fold-change in transgene mRNA expression and DNA copies per diploid genome
relative to AAV9 and AAV5 in the brain and liver of mice

| | Fold change in mRNA expression | | Fold change in mRNA expression | |
|---|---|---|---|---|
| | relative to AAV5 | | relative to AAV9 | |
| Tissue | AAV9 | TTN-002 | AAV5 | TTN-002 |
| Brain | 175.796 | 265.874 | 0.006 | 1.512 |
| Liver | 14.549 | 2.552 | 0.069 | 0.175 |
| | Fold change in DNA copies per diploid | | Fold change in DNA copies per diploid | |
| | genome relative to AAV5 | | genome relative to AAV9 | |
| Tissue | AAV9 | TTN-002 | AAV5 | TTN-002 |
| Brain | 15.910 | 9.367 | 0.063 | 0.589 |
| Liver | 25.140 | 1.664 | 0.040 | 0.066 |

### Conclusions

[1504] Taken together, these data demonstrate that TTN-002, which is an AAV5 capsid variant, is an enhanced CNS tropic capsid, in both NHPs and rodents (e.g., rats and mice), and was able to successfully penetrate the blood brain barrier. More specifically, TTN-002 demonstrated the ability to cross species, demonstrating enhanced CNS tropism and biodistribution in both NHPs and rats, and improvement relative to AAV5 in mice. Additionally, the TTN-002 capsid variant was able to successfully penetrate the blood brain barrier.

### Example 3. Maturation of the TTN-002 Capsid in Mice

[1505] This Example describes maturation of the TTN-002 (SEQ ID NO: 982 (amino acid) and 984 (DNA), comprising SEQ ID NO: 943) capsid variant in mice to further enhance its transduction and biodistribution in the central nervous system, evolve the AAV capsid variant further, and to provide cross-species compatibility. Two approaches were used to mature the TTN-002 capsid sequence in order to randomize and mutate within and around the peptide insert comprised within loop VIII of the capsid variant. In the first maturation approach, mutagenic primers were used to introduce point mutations at a low frequency, scattered across the mutagenesis region in the TTN-002 sequence ranging from approximately position 571 to position 586, numbered according to SEQ ID NO: 982. In the second maturation approach, sets of three contiguous amino acids were randomized across the mutagenesis region in the TTN-002 sequence, which spanned from approximately position 571 to position 586, numbered according to SEQ ID NO: 982. AAV capsid variants arising from each maturation approach for TTN-002 were pooled together, for subsequent testing and characterization in mice.

[1506] The library of pooled matured AAV capsid variants generated from TTN-002 using the first maturation approach and the library of pooled matured AAV capsid variants generated from TTN-002 using the second maturation approach were each injected into three CD-1 Outbred mice. After a period in life, the brains of the mice were isolated and RNA was extracted. Following RNA recovery and RT-PCR amplification, a systematic NGS enrichment analysis was performed to calculate the fold enrichment ratio relative to the TTN-002 control, and the peptides comprised within the matured variants were identified. The data from the first maturation approach are provided in Table 15 and the data from the second maturation approach is provided in Table 16.

[1507] Following the RNA recovery and NGS analysis from the first maturation approach, the matured capsid variants were filtered based on their coefficient of variance (CV), which was calculated for each peptide across six brain samples taken (two per mouse). Those that had a CV value <1 were identified, as these were the peptides that were reliably detected in 5/6 or 6/6 brain samples isolated from the three mice. Table 15 provides the peptide sequences of these matured capsid variants and the fold enrichment of the matured capsid variant relative to the non-matured TTN-002 control. As shown in Table 15, approximately 28 TTN-002 matured capsid variants demonstrated an increase in expression relative to the non-matured TTN-002 control, with approximately 16 variants demonstrating at least a 2-fold increase in expression. Several variants demonstrated at least an 8-fold to 15-fold increase in expression relative to the non-matured TTN-002 control.

TABLE 15
NGS fold-enrichment of TTN-002 matured AAV
capsid variants in the brain of outbred mice
following first mutagenesis approach

| | SEQ | Fold enrichment |
|---|---|---|
| Sequence | ID NO: | over TTN-002 |
| TNSVSSYPAEVVQKTA | 1537 | 15.404 |
| TNNQSKYPAEVVQKTA | 1538 | 10.261 |
| TNNSSSYPAEVVQKTA | 1539 | 8.539 |
| TNNQSSYPATVVQKTA | 1540 | 4.641 |
| TNNSGSYPAEVVQKTA | 1541 | 4.553 |
| TNNLSKYPAEVVQKTA | 1542 | 4.329 |
| TNNQSSYPASVVQKTA | 1543 | 3.849 |
| TNNMSRYPAEVVQKTA | 1544 | 3.586 |
| TNNLSRYPAEVVQKTA | 1545 | 3.580 |
| TNNQSSYPPSIVQKTA | 1546 | 3.529 |
| TNNASKYPAEVVQKTA | 1547 | 3.008 |
| TNNQSSYPPSVVQKTA | 1548 | 2.927 |
| TNNLSSYPAEVVQKTA | 1549 | 2.912 |
| TNNQSSYPATLVQKTA | 1550 | 2.688 |
| TNSLSSYPAEVVQKTA | 1551 | 2.243 |
| TNQVSSYPAEVVQKTA | 1552 | 2.157 |
| TNNVSLYPAEVVQKTA | 1553 | 2.075 |
| TNNQSSYPVTVVQKTA | 1554 | 1.857 |
| TNNTSTYPAEVVQKTA | 1555 | 1.753 |
| TNNQSSLTAEVVQKTA | 1556 | 1.612 |
| TNNTSLYPAEVVQKTA | 1232 | 1.484 |
| TNNQSSYPAPVVQKTA | 1558 | 1.478 |
| TNNQSSYPASLIQKTA | 1559 | 1.365 |
| TNTISSYPAEVVQKTA | 1560 | 1.263 |
| TNNQSSYPAPLQQKTA | 1561 | 1.261 |
| TNNQSSYPAPLVQKTA | 1562 | 1.149 |
| TNNQSSYPPSLVQKTA | 1300 | 1.141 |
| TNNPSRYPAEVVQKTA | 1564 | 1.106 |
| TNNQSSYPAEVVQKTA | 1533 | 1.000 |
| TNNSARYPAEVVQKTA | 1566 | 0.980 |

[1508] Following the RNA recovery and NGS analysis from the second maturation approach, the matured capsid variants were filtered for those that were detectable in all samples from all mice injected with the matured capsid variants. Table 16 provides the peptide sequences of these matured capsid variants, the fold enrichment of the matured capsid variant relative to the non-matured TTN-002 control, as well as the predicted capsid of origin from which the variant was matured. As shown in Table 16, approximately 526 TTN-002 matured capsid variants demonstrated an increase in expression relative to the non-matured TTN-002 control, with approximately 358 variants demonstrated at least a 2-fold increase in expression. Several variants demonstrated a 20-711-fold or greater increase in expression relative to the non-matured TTN-002 control.

TABLE 16
NGS fold-enrichment of TTN-002 matured AAV capsid variants in the brain of
outbred mice following second mutagenesis approach

| | SEQ | Fold | | SEQ | |
|---|---|---|---|---|---|
| | ID | enrichment | | ID | Fold enrichment |
| Sequence | NO: | over TTN-002 | Sequence | NO: | over TTN-002 |
| TNNFFMYPAEVVQKTA | 1000 | 711.864 | TNNQSSYPAELVQKTA | 1269 | 3.158 |
| TNNQSSYPAEALLKTA | 1001 | 107.670 | TNSLWSYPAEVVQKTA | 1270 | 3.150 |
| TNNQGTYPAEVVQKTA | 1002 | 87.226 | TNNQSSYPAETVSKTA | 1271 | 3.149 |
| TISASSYPAEVVQKTA | 1003 | 79.340 | TNNISLYPAEVVQKTA | 1272 | 3.114 |
| TNGVHSYPAEVVQKTA | 1004 | 37.131 | TNNQSSYPAEVVQKST | 1273 | 3.103 |
| TNNHSAYPAEVVQKTA | 1005 | 35.420 | TNNQSSYPAELVSKTA | 1274 | 3.082 |
| TNNMAPYPAEVVQKTA | 1006 | 34.417 | TNNTGRYPAEVVQKTA | 1275 | 3.067 |
| TNNIATYPAEVVQKTA | 1007 | 32.786 | TYSTSSYPAEVVQKTA | 1276 | 3.065 |
| TNQISSYPAEVVQKTA | 1008 | 30.799 | TNTLSSYTAEVVQKTA | 1277 | 3.040 |
| TNNQSSYPAEVVQKLS | 1009 | 30.539 | TNSTSSYPAEVVQKTA | 1278 | 3.033 |
| TNNLGQYPAEVVQKTA | 1010 | 28.520 | TNAVFSYPAEVVQKTA | 1279 | 3.025 |
| TNNPGAYPAEVVQKTA | 1011 | 27.637 | TNSTYSYPAEVVQKTA | 1280 | 3.025 |
| TNNQSSYPAEVVQKLK | 1012 | 27.076 | TNNLSMYPAEVVQKTA | 1281 | 2.997 |
| TNNQSSYPAAIIQKTA | 1013 | 26.618 | TNNQSSYPATLVQKPA | 1282 | 2.973 |
| TNNQSSYNTKVVQKTA | 1014 | 22.549 | TNNISVYPAEVVQKTA | 1283 | 2.969 |
| TNKITSYPAEVVQKTA | 1015 | 22.308 | TNNQSSYPAPVVQKTA | 1284 | 2.937 |
| TNNIGRYPAEVVQKTA | 1016 | 22.159 | TNTQSSYPAEVVQKTA | 1285 | 2.929 |
| TNLIASYPAEVVQKTA | 1017 | 22.050 | TNNQSSYPQSVVQKTA | 1286 | 2.922 |
| TNNTAGYPAEVVQKTA | 1018 | 21.846 | TNNSSVYPAEVVQKPA | 1287 | 2.920 |
| TNNMAKYPAEVVQKTA | 1019 | 21.371 | TNNQSSYPANQSQKTA | 1288 | 2.889 |
| TNNMAQYPAEVVQKTA | 1020 | 20.203 | TNNLAVYPAEVVQKTA | 1289 | 2.888 |
| TNNAGAYPAEVVQKTA | 1021 | 19.342 | TNNPSRYPAEVVQKTA | 1290 | 2.877 |
| TMSASSYPAEVVQKTA | 1022 | 19.003 | TNTTSSYPAEVVQKPA | 1291 | 2.873 |
| TNNAAVYPAEVVQKTA | 1023 | 18.655 | TNNQSSYPTNTVQKTA | 1292 | 2.866 |
| INNQSSYPAEVVQKTA | 1024 | 18.426 | TNNTGLYPAEVVQKTA | 1293 | 2.862 |
| TNNNSKYPAEVVQKTA | 1025 | 18.030 | TLLNSSYPAEVVQKTA | 1294 | 2.847 |
| TNNTSHYPAEVVQKTA | 1026 | 17.574 | TNNSALYPAEVVQKTA | 1295 | 2.797 |
| TNNLGSYPAEVVQKTA | 1027 | 17.430 | TNNLSLYPAEVVQKTA | 1296 | 2.777 |
| TNNQSSYPAEVISKTA | 1028 | 17.172 | TNNQSSYPAEVKSRTA | 1297 | 2.760 |
| TNLIDSYPAEVVQKTA | 1029 | 16.804 | TNNQSTATAEVVQKTA | 1298 | 2.745 |
| TNNTSGYPAEVVQKTA | 1030 | 16.556 | TNNQSSYPRDLVQKTA | 1299 | 2.726 |
| TNNQSSYPANDTQKTA | 1031 | 15.769 | TNNQSSYPPSLVQKTA | 1300 | 2.719 |
| TNNTAQYPAEVVQKTA | 1032 | 15.607 | TNSVSSYPAEVVQNTA | 1301 | 2.703 |
| TNLVSSYPAEVVQKTA | 1033 | 15.329 | TNNTAMYPAEVVQKTA | 1302 | 2.700 |
| TNNVSQYPAEVVQKTA | 1034 | 15.269 | TNNQGAYPAEVVQKTA | 1303 | 2.678 |
| TNNMSMYPAEVVQKTA | 1035 | 15.241 | TNNQSSYPPTVVQKTA | 1304 | 2.665 |
| TNSVSSYPAEVVQKTA | 1036 | 14.066 | TNNSAKYPAEVVQKTA | 1305 | 2.645 |
| TNSIGSYPAEVVQKTA | 1037 | 13.549 | TNNQSLYPAEVVQKTA | 1306 | 2.630 |
| TNNVSYYPAEVVQKTA | 1038 | 13.380 | TNNVSSYPAEVVQKPA | 1307 | 2.622 |
| TNNAASYPAEVVQKTA | 1039 | 13.290 | TNNLAPYPAEVVQKTA | 1308 | 2.619 |
| TNNMSIYPAEVVQKTA | 1040 | 13.095 | TNSPSSYPAEVVQKTA | 1309 | 2.608 |
| TNNVSGYPAEVVQKTA | 1041 | 12.734 | TNNHSSYPAEVVQKTA | 1310 | 2.600 |
| TNNMASYPAEVVQKTA | 1042 | 12.673 | TNNQSSYPAPVIQKTA | 1311 | 2.599 |
| TNNQSSYPAQIVQKTA | 1043 | 12.669 | TNNLSLYPAEVVQKPA | 1312 | 2.598 |
| TNKISSYPAEVVQKTA | 1044 | 12.551 | TNNVSKYPAEVVQKTA | 1313 | 2.593 |
| TNRVSSYPAEVVQKTA | 1045 | 12.551 | TNNQSYNPAEVVQKTA | 1314 | 2.582 |
| TNNVGYYPAEVVQKTA | 1046 | 12.544 | TNNPSVYPAEVVQKTA | 1315 | 2.559 |
| TNNLGAYPAEVVQKTA | 1047 | 12.445 | TNNIAPYPAEVVQKTA | 1316 | 2.552 |
| TNNTSQYPAEVVQKTA | 1048 | 12.264 | TNNQLTTPAEVVQKTA | 1317 | 2.486 |
| TNNQSSYPPKVVQKTA | 1049 | 12.245 | TNNLGKYPAEVVQKTA | 1318 | 2.484 |
| TNNVTMYPAEVVQKTA | 1050 | 12.226 | TNNQSSYPAHLIQKTA | 1319 | 2.480 |
| TNNQSSNPTEVVQKTA | 1051 | 12.190 | TNNMSTYPAEVVQKTA | 1320 | 2.467 |
| TNNIAWYPAEVVQKTA | 1052 | 12.018 | TNNQSSYPASVIQKTA | 1321 | 2.457 |
| TNNAAAYPAEVVQKTA | 1053 | 11.885 | TNNQSSYPAEVESKLA | 1322 | 2.455 |
| TNNTASYPAEVVQKTA | 1054 | 11.862 | TNSVSSYPAEVVKKTA | 1323 | 2.451 |
| TNKVASYPAEVVQKTA | 1055 | 11.641 | TNNVSPYPAEVVQKTA | 1324 | 2.437 |
| TNNIGTYPAEVVQKTA | 1056 | 11.597 | TNNQSSYPPNMVQKTA | 1325 | 2.413 |
| TNNLSKYPAEVVQKTA | 1057 | 11.521 | TNNQSSYPANQTQKTA | 1326 | 2.412 |
| TNNLAKYPAEVVQKTA | 1058 | 11.498 | TNNQSRYPAEVVQKTA | 1327 | 2.409 |
| TNNQARYPAEVVQKTA | 1059 | 11.473 | TNTQASYPAEVVQKTA | 1328 | 2.390 |
| TNNQSSYPATIIQKTA | 1060 | 11.443 | TNNQSSYPMPLVQKTA | 1329 | 2.388 |
| TNNISHYPAEVVQKTA | 1061 | 11.290 | TNNQSSYPREVVQKTA | 1330 | 2.364 |
| TKTTSSYPAEVVQKTA | 1062 | 11.194 | TNNSSSYPAEVVKKTA | 1331 | 2.340 |
| TNNQSSYPAEVVSKLA | 1063 | 11.081 | TNNQSSYPAPLQQKTA | 1332 | 2.339 |
| TNFVASYPAEVVQKTA | 1064 | 11.061 | TNLSGSYPAEVVQKTA | 1333 | 2.326 |
| TNNTSDYPAEVVQKTA | 1065 | 11.043 | TNNKSMYPAEVVQKTA | 1334 | 2.319 |
| TNNQSSYPPELVQKTA | 1066 | 11.019 | TNNQSSYPVTVVQKTA | 1335 | 2.315 |
| TNNMSLYPAEVVQKTA | 1067 | 10.882 | TNKQSSYPASVVQKTA | 1336 | 2.312 |
| TNNQEKYPAEVVQKTA | 1068 | 10.869 | TNNLSYYPAEVVQKTA | 1337 | 2.311 |
| TNNQSSYPADIVQKTA | 1069 | 10.822 | TNNSSLYPAEVVQKTA | 1338 | 2.307 |
| TNNMAMYPAEVVQKTA | 1070 | 10.807 | TNNQSSYPPNTVQKTA | 1339 | 2.307 |
| TNNQSSYPAELIEKTA | 1071 | 10.660 | TNNQSSYPALVIQKTA | 1340 | 2.289 |
| TNNQSSYPPDVVQKTA | 1072 | 10.538 | TNNQGVYPAEVVQKTA | 1341 | 2.275 |
| TNNLSAYPAEVVQKTA | 1073 | 10.500 | TNNQSRYPAEEVQKTA | 1342 | 2.233 |
| TNNIAHYPAEVVQKTA | 1074 | 10.408 | TNNQSSYPPHVVQKTA | 1343 | 2.231 |
| TNNHAKYPAEVVQKTA | 1075 | 10.319 | TNVVSSYPAEVVQKTA | 1344 | 2.225 |
| TNNMSRYPAEVVQKTA | 1076 | 10.233 | TNNQGTIPAEVVQKTA | 1345 | 2.218 |
| TNNTSSYPAEVVQKTA | 1077 | 10.000 | TNNQSSYPATLVQKTA | 1346 | 2.200 |
| TNNPAAYPAEVVQKTA | 1078 | 9.842 | TNNLSSYPAEVVQKTA | 1347 | 2.190 |
| TNSTFSYPAEVVQKTA | 1079 | 9.812 | TTLTSSYPAEVVQKTA | 1348 | 2.129 |
| TNNQSSYPAEVVQKTS | 1080 | 9.758 | TNLGGSYPAEVVQKTA | 1349 | 2.125 |
| TNNQSSYPAEVVQKSS | 1081 | 9.758 | TNNQSSYPAEVVNKLA | 1350 | 2.107 |
| TNNTSIYPAEVVQKTA | 1082 | 9.739 | TNNVGLYPAEVVQKTA | 1351 | 2.106 |
| TNNLAYYPAEVVQKTA | 1083 | 9.674 | TNNQSTPPAEVVQKTA | 1352 | 2.094 |
| TNNMGYYPAEVVQKTA | 1085 | 9.584 | TNNSTIYPAEVVQKTA | 1353 | 2.089 |
| TNLVSSYPAEVVQKPA | 1086 | 9.577 | TNNSAMYPAEVVQKTA | 1354 | 2.073 |
| TNNQAIYPAEVVQKTA | 1087 | 9.556 | TNTISSYPAEVVQKTA | 1355 | 2.069 |
| TNNPNSYPAEVVQKTA | 1088 | 9.484 | TNNQSSYPAALIQKTA | 1356 | 2.069 |
| TKTISSYPAEVVQKTA | 1089 | 9.438 | TNLGSSYPAEVVQKTA | 1357 | 2.061 |
| TNNIASYPAEVVQKTA | 1090 | 9.423 | TNKMSSYPAEVVQKTA | 1358 | 2.056 |
| TNMIASYPAEVVQKTA | 1091 | 9.410 | TNNQSSYPAEEVQKLK | 1359 | 2.032 |
| TNNMGAYPAEVVQKTA | 1092 | 9.403 | NNNQSSYPASVVQKTA | 1360 | 2.032 |
| TNAVHSYPAEVVQKTA | 1093 | 9.332 | TNNISPYPAEVVQKTA | 1361 | 2.008 |
| TNNISNYPAEVVQKTA | 1094 | 9.304 | TNNQSSYPPPVVQKTA | 1362 | 2.000 |
| TKSASSYPAEVVQKTA | 1095 | 9.240 | TNSVASYPAEVVQKTA | 1363 | 1.983 |
| TNNVGRYPAEVVQKTA | 1096 | 9.183 | TNNQSSYPAEVIRKTA | 1364 | 1.974 |
| TNNMSVYPAEVVQKTA | 1097 | 9.158 | TNNSSKYPAEVVQKTA | 1365 | 1.972 |
| TNNVSTYPAEVVQKTA | 1098 | 9.126 | TNNMALYPAEVVQKTA | 1366 | 1.970 |
| TNNTSAYPAEVVQKTA | 1099 | 9.074 | TNKLSSYPAEVVQKTA | 1367 | 1.960 |
| TNNQSSYPAEVVNKTA | 1100 | 8.893 | TNNQSSYPAPVVQKPA | 1368 | 1.959 |
| TNNQAMYPAEVVQKTA | 1101 | 8.788 | TNNQSSSVAEVVQKTA | 1369 | 1.945 |
| TNNQSSYPAEVIQKTA | 1102 | 8.727 | TNSIWSYPAEVVQKTA | 1370 | 1.937 |
| TNNASAYPAEVVQKTA | 1103 | 8.711 | TNNQRSYPATLVQKTA | 1371 | 1.936 |
| TNNLAAYPAEVVQKTA | 1104 | 8.670 | TNNQSSRDAEVVQKTA | 1372 | 1.933 |
| TNKVSSYPAEVVQKTA | 1105 | 8.280 | TNKVTSYPAEVVQKTA | 1373 | 1.932 |
| TNNQSSYPANLIQKTA | 1106 | 8.247 | TNNQAYYPAEVVQKTA | 1374 | 1.928 |
| TNNQSSYPSDIVQKTA | 1107 | 8.206 | TNNQSSYPATVVQKTA | 1375 | 1.916 |
| TNNQSSRESEVVQKTA | 1108 | 8.198 | TNNQSGISAEVVQKTA | 1376 | 1.915 |
| TNNISRYPAEVVQKTA | 1109 | 8.130 | TNNLALYPAEVVQKTA | 1377 | 1.904 |
| TNNTAPYPAEVVQKTA | 1110 | 8.050 | TNNQAVYPAEVVQKTA | 1378 | 1.889 |
| TNNQSQYPAEVVQKTA | 1111 | 7.947 | TNNQSSNQAEVVQKTA | 1379 | 1.864 |
| TNNIGSYPAEVVQKTA | 1112 | 7.845 | TNNMSRYPAEVEQKTA | 1380 | 1.857 |
| TNNIGVYPAEVVQKTA | 1113 | 7.821 | TKTLSSYPAEVVQKTA | 1381 | 1.855 |
| TNNTNSYPAEVVQKTA | 1114 | 7.794 | TNNAWSYPAEVVQKTA | 1382 | 1.848 |
| TNNIARYPAEVVQKTA | 1115 | 7.751 | TNNQSSYPASMSQKTA | 1384 | 1.832 |
| TNNLSRYPAEVVQKTA | 1116 | 7.723 | TNLTPSYPAEVVQKTA | 1385 | 1.828 |
| TNNQSSYPEQVVQKTA | 1117 | 7.705 | TNLTSSYPAEVVQKTA | 1386 | 1.818 |
| TNKNASYPAEVVQKTA | 1118 | 7.686 | TNNLSSYPAEVEQKTA | 1387 | 1.793 |
| TNNTSTYPAEVVQKTA | 1119 | 7.650 | TNNQSNVTAEVVQKTA | 1388 | 1.792 |
| TNNSSIYPAEVVQKTA | 1120 | 7.645 | TNNQSSYPPQVVQKTA | 1389 | 1.779 |
| TNNQSSYPAEVVQKTT | 1121 | 7.641 | TNNQSSVSAEVVQKTA | 1390 | 1.762 |
| TNSGWSYPAEVVQKTA | 1122 | 7.631 | TNNQSSYPPNTVQKPA | 1391 | 1.730 |
| TNFIASYPAEVVQKTA | 1123 | 7.624 | TNLESSYPAEVVQKTA | 1392 | 1.728 |
| TNSTWSYPAEVVQKTA | 1124 | 7.604 | TNMVASYPAEVVQKTA | 1394 | 1.715 |
| TNNLGNYPAEVVQKTA | 1125 | 7.585 | TNNQSSTPSEVVQKTA | 1395 | 1.709 |
| TNNQSSYPPSIVQKTA | 1126 | 7.576 | TNNLSSYPAEVVQKPA | 1396 | 1.698 |
| TVASSSYPAEVVQKTA | 1127 | 7.500 | TNNQSPPRAEVVQKTA | 1397 | 1.692 |
| TNNQSSYPAELIAKTA | 1128 | 7.498 | TNSLGSYPAEVVQKTA | 1398 | 1.680 |
| TNNLARYPAEVVQKTA | 1129 | 7.477 | TNSTWSYPAEVVQKPA | 1399 | 1.674 |
| TNNQSSYPAEVVQKLN | 1130 | 7.430 | TNNQSSYPASVVQKPA | 1400 | 1.672 |
| TNNLSQYPAEVVQKTA | 1131 | 7.420 | TNNQSSYPAEVASKTA | 1401 | 1.669 |
| TNNISYYPAEVVQKTA | 1132 | 7.337 | TNNQSSYPAEVLHKTA | 1402 | 1.664 |
| TNNSSVYPAEVVQKTA | 1133 | 7.278 | TNTQSSYPASVVQKTA | 1403 | 1.636 |
| TNNQSSYPAEIVHKTA | 1134 | 7.273 | TNNQSSYPPSVEQKTA | 1404 | 1.635 |
| TNNLSVYPAEVVQKTA | 1135 | 7.251 | TNNQRSYPPSVVQKTA | 1405 | 1.632 |
| TNITGSYPAEVVQKTA | 1136 | 7.246 | TNNQSSYPAELVNKTA | 1407 | 1.624 |
| TNNMSKYPAEVVQKTA | 1137 | 7.233 | TNNLSGYPAEVVQKTA | 1408 | 1.618 |
| TNNCGSYPAEVVQKTA | 1138 | 7.143 | TNNQSSYPAEVVSKTA | 1409 | 1.617 |
| TNNVSSYPAEVVQKTA | 1139 | 7.074 | TNTVSSYTAEVVQKTA | 1410 | 1.614 |
| TNNIALYPAEVVQKTA | 1140 | 7.043 | TNSTSSYPAEVVQKPA | 1411 | 1.614 |
| TNNQLSIPAEVVQKTA | 1141 | 7.017 | TNNTSHYPAEEVQKTA | 1412 | 1.608 |
| TNNSSSYPAEVVQKPA | 1142 | 6.889 | TNNPSIYPAEVVQKTA | 1413 | 1.605 |
| TNNQSSYPAAVIQKTA | 1143 | 6.870 | TNTMSSYPAEVVQKTA | 1414 | 1.602 |
| TNNQSSYPAEIISKTA | 1144 | 6.669 | TNNQSHNPAEVVQKTA | 1415 | 1.597 |
| TNCVSSYPAEVVQKTA | 1145 | 6.662 | TNNQSSYPAELIHKTA | 1416 | 1.592 |
| TNNTARYPAEVVQKTA | 1146 | 6.649 | TNNQSSYPPSVVQKTA | 1417 | 1.587 |
| TNNQSSYPAEVINKTA | 1147 | 6.627 | TNNQSFYPAEVVQKTA | 1418 | 1.574 |
| TNSIASYPAEVVQKTA | 1148 | 6.607 | TNNSSSYPAEVVQQTA | 1419 | 1.571 |
| TNNQSSREAEVVQKTA | 1149 | 6.499 | TNTVSSYPAEVVQKTA | 1420 | 1.570 |
| TNNITRYPAEVVQKTA | 1150 | 6.373 | TNNQSPPSAEVVQKTA | 1421 | 1.563 |
| TNNTSVYPAEVVQKTA | 1151 | 6.372 | TNNQSTAPAEVVQKTA | 1422 | 1.552 |
| TNNTGSYPAEVVQKTA | 1152 | 6.357 | TNNQSSYPAEVVHKTA | 1423 | 1.534 |
| TNNMSQYPAEVVQKTA | 1153 | 6.346 | TNNQSSYPAMVVQKTA | 1424 | 1.532 |
| TNNISSYPAEVVQKTA | 1154 | 6.335 | TNNQATNPAEVVQKTA | 1425 | 1.530 |
| TNNSASYPAEVVQKTA | 1155 | 6.319 | TNNVSSYQAEVVQKTA | 1426 | 1.530 |
| TNSISSYPAEVVQKTA | 1156 | 6.294 | TNHVSSYPAEVVQKTA | 1427 | 1.523 |
| TNNISMYPAEVVQKTA | 1157 | 6.235 | TNNVSWYPAEVVQKTA | 1428 | 1.520 |
| TNNTATYPAEVVQKTA | 1158 | 6.215 | TNSLSSYPAEVVQKTA | 1429 | 1.504 |
| TNNISTYPAEVVQKTA | 1159 | 6.201 | TNSVYSYPAEVVQKTA | 1430 | 1.498 |
| TNNVSHYPAEVVQKTA | 1160 | 6.141 | TNHTSSYPAEVVQKTA | 1431 | 1.493 |
| TNNSGSYPAEVVQKTA | 1161 | 6.123 | TNNQSSYPAPLVQKPA | 1432 | 1.490 |
| TNNLASYPAEVVQKTA | 1162 | 6.091 | TNSTTSYPAEVVQKTA | 1433 | 1.483 |
| TNNVSFYPAEVVQKTA | 1163 | 6.088 | TNNQSSYPAEVGSKLA | 1434 | 1.482 |
| TNNQSSYPVQVVQKTA | 1164 | 6.075 | TNNQSSYPVNTVQKTA | 1435 | 1.477 |
| TNNQAAYPAEVVQKTA | 1165 | 6.059 | TNNQSQSPAEVVQKTA | 1436 | 1.471 |
| TNQVSSYPAEVVQKTA | 1166 | 6.058 | TNNQSSYPPPLVQKTA | 1437 | 1.468 |
| TNSVGSYPAEVVQKTA | 1167 | 6.020 | TNNTSGYPAEVVQKPA | 1438 | 1.463 |
| TNTPASYPAEVVQKTA | 1168 | 5.992 | TNFSSSYPAEVVQKTA | 1439 | 1.460 |
| TNNLAMYPAEVVQKTA | 1169 | 5.970 | TNGVYSYPAEVVQKTA | 1440 | 1.457 |
| TNTTSSYPAEVVQKTA | 1170 | 5.964 | TNNQSSYPAPVVQQTA | 1441 | 1.455 |
| TNNSSSYPAEVVQKTA | 1539 | 5.903 | TNSLFSYPAEVVQKTA | 1442 | 1.450 |
| TNNQSSYPAEVVQNLK | 1172 | 5.868 | TNNQSSYPAEVIKKTA | 1443 | 1.449 |
| TNNLSIYPAEVVQKTA | 1173 | 5.815 | TNNQSSYPASMIQKTA | 1444 | 1.446 |
| TNNQSSYPAQVVQKTA | 1174 | 5.773 | TNNSVSYPAEVVQKTA | 1445 | 1.445 |
| TNTSASYPAEVVQKTA | 1175 | 5.741 | TNFVSSYPAEVVQKTA | 1446 | 1.444 |
| TNNTSKYPAEVVQKTA | 1176 | 5.652 | TNLISSYPAEVVQKTA | 1447 | 1.427 |
| TNNTTVYPAEVVQKTA | 1177 | 5.625 | TNNSAVYPAEVVQKTA | 1448 | 1.418 |
| TNNQSSYPPEVVQKTA | 1178 | 5.541 | TLSASSYPAEVVQKTA | 1449 | 1.417 |
| TNNQSSYPAEVMSRTA | 1179 | 5.539 | TNAVSSYPAEVVQKTA | 1450 | 1.417 |
| TNNASQYPAEVVQKTA | 1180 | 5.532 | TNNQSSTLIEVVQKTA | 1451 | 1.411 |
| TNNTSYYPAEVVQKTA | 1181 | 5.525 | TNNQSAYPAEVVQKTA | 1452 | 1.404 |
| TNNVSMYPAEVVQKTA | 1182 | 5.522 | TNNQSKYPAEVVHKTA | 1453 | 1.402 |
| TNNLGRYPAEVVQKTA | 1183 | 5.509 | TNNLSIYPAEVVQKPA | 1454 | 1.402 |
| TNNVAPYPAEVVQKTA | 1184 | 5.492 | TNPISSYPAEVVQKTA | 1455 | 1.396 |
| TNNQSIYPAEVVQKTA | 1185 | 5.491 | TNNQSSYPVAVVQKTA | 1456 | 1.394 |
| TNNQSKYPAEVVQKTA | 1538 | 5.468 | TNNSNMYPAEVVQKTA | 1457 | 1.383 |
| TNKIASYPAEVVQKTA | 1187 | 5.445 | TNNSNSYPAEVVQKTA | 1458 | 1.379 |
| TNNSSRYPAEVVQKTA | 1188 | 5.231 | TNNSSPYPAEVVQKTA | 1459 | 1.362 |
| TNNQSSYPAAVVQKTA | 1189 | 5.228 | SLVQSSYPAEVVQKTA | 1460 | 1.358 |
| TNNQSSYPAEVVQKLT | 1190 | 5.112 | TNNQSSYPAELKSKTA | 1461 | 1.357 |
| TNTIASYPAEVVQKTA | 1191 | 5.112 | TNSISSYTAEVVQKTA | 1462 | 1.357 |
| TNTLSSYPAEVVQKTA | 1192 | 5.055 | TNNQSSYPTNSVQKTA | 1463 | 1.344 |
| TNNQSSYPAKLIQKTA | 1193 | 5.051 | TNNSSQYPAEVVQKTA | 1464 | 1.340 |
| TNNQASYPAEVVQKTA | 1194 | 5.004 | TSLQSSYPAEVVQKTA | 1465 | 1.339 |
| TNNVGSYPAEVVQKTA | 1195 | 4.953 | TNNQSPYPAEVVQKTA | 1466 | 1.325 |
| HTRQSSYPAEVVQKTA | 1196 | 4.804 | TNNQSYYPASVVQKTA | 1467 | 1.318 |
| TNNMGSYPAEVVQKTA | 1197 | 4.785 | TNNLSAYTAEVVQKTA | 1468 | 1.313 |
| TNNVASYPAEVVQKTA | 1198 | 4.765 | TNNVSAYPAEVVQKTA | 1469 | 1.307 |
| TNNASGYPAEVVQKTA | 1199 | 4.760 | TNTVSSYPAEVVQKPA | 1470 | 1.299 |
| TNSPWSYPAEVVQKTA | 1200 | 4.674 | TNNNSVYPAEVVQKTA | 1471 | 1.289 |
| TNNVSNYPAEVVQKTA | 1201 | 4.611 | TNNQSSYPAPLVQKTA | 1472 | 1.284 |
| TNNQAKYPAEVVQKTA | 1202 | 4.606 | TNNQNSPPAEVVQKTA | 1473 | 1.263 |
| TNNQTTPPAEVVQKTA | 1204 | 4.480 | TNSVVSYPAEVVQKTA | 1474 | 1.261 |
| TSSASSYPAEVVQKTA | 1205 | 4.465 | TNNISKYPAEVVQKTA | 1475 | 1.258 |
| TNNTSFYPAEVVQKTA | 1206 | 4.427 | TNSPFSYPAEVVQKTA | 1476 | 1.252 |
| TNNLANYPAEVVQKTA | 1207 | 4.415 | TNNQSSYPAELLSKTA | 1477 | 1.252 |
| TNNTSRYPAEVVQKTA | 1208 | 4.396 | TNNQSSTRSEVVQKTA | 1478 | 1.250 |
| TNNQSSYPASVVKKTA | 1209 | 4.347 | TNMVSSYPAEVVQKTA | 1479 | 1.249 |
| TLQQSSYPAEVVQKTA | 1210 | 4.309 | TNNQLPIPAEVVQKTA | 1480 | 1.244 |
| TNNQSSYPAGVIQKTA | 1211 | 4.272 | TNNTSMYPAEVVQKTA | 1481 | 1.241 |
| TNNQSSYPAETMSKTA | 1212 | 4.266 | TNNQSSYPSTVVQKTA | 1482 | 1.240 |
| TYTLSSYPAEVVQKTA | 1213 | 4.256 | TNNQSSYPATVVKKTA | 1483 | 1.238 |
| TNNSSSYTAEVVQKTA | 1214 | 4.204 | TNNQSSLTAEVVQKTA | 1484 | 1.237 |
| TNNTALYPAEVVQKTA | 1215 | 4.200 | TNNQSSYPPSVVQKPA | 1485 | 1.224 |
| TNNLTYYPAEVVQKTA | 1216 | 4.198 | TNNVTKYPAEVVQKTA | 1486 | 1.210 |
| TNNQSSYPAMVIQKTA | 1217 | 4.192 | TNNQSSYPPNVVQKTA | 1487 | 1.210 |
| TNNVTRYPAEVVQKTA | 1218 | 4.189 | TNNQSSYPAELMSKTA | 1488 | 1.205 |
| TNNMSAYPAEVVQKTA | 1219 | 4.186 | TNALSSYPAEVVQKTA | 1489 | 1.202 |
| TNNQSSYPAEVIAKTA | 1220 | 4.186 | TNNQSSYPANVVQKTA | 1490 | 1.201 |
| TNNLAQYPAEVVQKTA | 1221 | 4.176 | TNNSALYPAEVVQKPA | 1491 | 1.201 |
| TNNTGGYPAEVVQKTA | 1222 | 4.111 | TVTQSSYPAEVVQKTA | 1492 | 1.197 |
| TNNQSSYPAEIVQKTA | 1223 | 4.093 | TNNQSSVTLEVVQKTA | 1493 | 1.191 |
| TNNISAYPAEVVQKTA | 1224 | 4.078 | TNNVSVYPAEVVQKTA | 1494 | 1.190 |
| TNNQSMYPAEVVQKTA | 1225 | 4.058 | TNNQSSYPQELVQKTA | 1495 | 1.188 |
| TNTLGSYPAEVVQKTA | 1226 | 4.043 | TNNQSSYPASVNQKTA | 1496 | 1.180 |
| TNNQSSYPAESVQKTA | 1227 | 4.042 | TNNQSSYPASIIQKTA | 1497 | 1.171 |
| TNNPSGYPAEVVQKTA | 1228 | 3.980 | TNNQSSYPAPVVKKTA | 1498 | 1.163 |
| TNNQDNMPAEVVQKTA | 1229 | 3.917 | TNNLAFYPAEVVQKTA | 1499 | 1.158 |
| TNNVSLYPAEVVQKTA | 1230 | 3.868 | TNNQSSYPAEAVSKTA | 1500 | 1.157 |
| TNNASSYPAEVVQKTA | 1231 | 3.832 | TNNQSSYPAPLEQKTA | 1501 | 1.156 |
| TNNTSLYPAEVVQKTA | 1232 | 3.828 | TNNLSKYPAEVVQKTD | 1502 | 1.154 |
| TNNQSSYPASVVQKTA | 1233 | 3.809 | TNNQSSYPAPLIQKTA | 1503 | 1.143 |
| TNNQSSYPAELISKTA | 1234 | 3.772 | TNTLASYPAEVVQKTA | 1504 | 1.140 |
| TNSVHSYPAEVVQKTA | 1235 | 3.770 | TNNQSSYPPGVVQKTA | 1505 | 1.139 |
| TNSVWSYPAEVVQKTA | 1236 | 3.762 | TNNQSTQRAEVVQKTA | 1506 | 1.125 |
| TTTPSSYPAEVVQKTA | 1237 | 3.732 | TNNLSRYTAEVVQKTA | 1507 | 1.122 |
| TTTTSSYPAEVVQKTA | 1238 | 3.728 | TNTVSSYPAEEVQKTA | 1508 | 1.122 |
| TNNQSSYPESNVQKTA | 1240 | 3.683 | TNNQSSVAAEVVQKTA | 1509 | 1.106 |
| TNNQSSYPPDLVQKTA | 1241 | 3.672 | TNNHSRYPAEVVQKTA | 1510 | 1.101 |
| TNLVASYPAEVVQKTA | 1242 | 3.621 | TNNQSSYPPAVVQKTA | 1511 | 1.088 |
| TNLVSSYQAEVVQKTA | 1243 | 3.575 | TNNVSRYPAEVVQKTA | 1512 | 1.078 |
| TNNQSVYPAEVVQKTA | 1244 | 3.568 | TNKQSSYPAPVVQKTA | 1513 | 1.074 |
| TNNQGYYPAEVVQKTA | 1245 | 3.550 | TNNQSSYPAEVSSKTA | 1514 | 1.072 |
| TNSPRSYPAEVVQKTA | 1248 | 3.508 | TNNSSHYPAEVVQKTA | 1515 | 1.072 |
| TNNQSSYPASLIQKTA | 1249 | 3.504 | TNNSPSYPAEVVQKTA | 1516 | 1.070 |
| TNNSTRYPAEVVQKTA | 1250 | 3.500 | TNNQSSYPSTIVQKTA | 1517 | 1.070 |
| TNNSGAYPAEVVQKTA | 1251 | 3.497 | TNATSSYPAEVVQKTA | 1518 | 1.069 |
| TNNLAIYPAEVVQKTA | 1252 | 3.450 | TNVSLSYPAEVVQKTA | 1519 | 1.068 |
| TNHVASYPAEVVQKTA | 1253 | 3.436 | TNNQSSYPASMVQKTA | 1520 | 1.067 |
| TNNQSKYPAEVEQKTA | 1254 | 3.434 | TNLVSSYPAEVLQKTA | 1521 | 1.058 |
| TNNHASYPAEVVQKTA | 1255 | 3.413 | TNNQSSLNAEVVQKTA | 1522 | 1.057 |
| TNSESSYPAEVVQKTA | 1256 | 3.392 | TNNPSKYPAEVVQKTA | 1523 | 1.050 |
| TNNQSSYPANSVQKTA | 1257 | 3.344 | TNNQSSYPASIVQKTA | 1524 | 1.046 |
| TNNQSSYPAELVHKTA | 1258 | 3.344 | TNNTVSYPAEVVQKTA | 1525 | 1.045 |
| TNNQSSYPPNSVQKTA | 1259 | 3.313 | TNNVALYPAEVVQKTA | 1526 | 1.045 |
| TNNTAKYPAEVVQKTA | 1260 | 3.304 | TNNQSSYPPVVVQKTA | 1527 | 1.014 |
| TNNKTSYPAEVVQKTA | 1261 | 3.271 | TNNQSSYPSSVVKKTA | 1528 | 1.014 |
| TNNNSNYPAEVVQKTA | 1262 | 3.220 | TNNQSSYPAEVLKKTA | 1529 | 1.011 |
| TNTLSSYQAEVVQKTA | 1263 | 3.212 | TNNQSTLTAEVVQKTA | 1530 | 1.011 |
| TNRISSYPAEVVQKTA | 1264 | 3.210 | TNNQSSYPAPLVQQTA | 1531 | 1.005 |
| TNNQSSYPATLIQKTA | 1265 | 3.200 | TNNLSPYPAEVVQKTA | 1532 | 1.001 |
| TNNGVSYPAEVVQKTA | 1266 | 3.191 | TNNQSSYPAEVVQKTA | 1533 | 1.000 |
| TNNTSSYPAEVVQKPA | 1267 | 3.173 | TNNQLTSPAEVVQKTA | 1534 | 0.995 |
| TNNQSSYPAEVVQKTP | 1268 | 3.165 | TNNLSHYPAEVVQKTA | 1535 | 0.991 |

[1509] These data demonstrate that following two maturation approaches, matured TTN-002 capsid variants with loop VIII modifications were generated with significantly enhanced CNS tropism in mice compared to the corresponding non-matured capsid variants, which already exhibited a significant fold enrichment over AAV5 and/or AAV9 in the brain of mice, rats, and/or NHPs.

### Example 4. Maturation of the TTN-002 Capsid in NHPs

[1510] This Example describes maturation of TTN-002 (SEQ ID NO: 982 (amino acid) and 984 (DNA), comprising SEQ ID NO: 943 (encoded by SEQ ID NO: 944)) capsid variant in NHPs, specifically cynomolgus macaques (Macaca fascicularis), to further enhance its transduction and biodistribution in the central nervous system and peripheral tissues and to evolve the AAV capsid variant further. Two approaches were used to mature the TTN-002 capsid sequences in order to randomize and mutate within and around the peptide insert comprised within loop VIII of the capsid variant. In the first maturation approach, mutagenic primers were used to introduce point mutations at a low frequency, scattered across the mutagenesis region in the TTN-002 sequence ranging from approximately position 571 to position 586, numbered according to SEQ ID NO: 982. In the second maturation approach, sets of three contiguous amino acids were randomized across the mutagenesis region in the TTN-002 sequence, which spanned from approximately position 571 to position 586, numbered according to SEQ ID NO: 982. AAV capsid variants arising from each maturation approach for TTN-002 were pooled together, for subsequent testing and characterization in NHPs.

[1511] The library of pooled matured AAV capsid variants generated from TTN-002 using the first maturation approach and the library of pooled matured AAV capsid variants generated from TTN-002 using the second maturation approach were each injected into two NHPs. After a period in life, the brains, heart, liver, muscle, and DRG of the NHPs were isolated and RNA was extracted. Following RNA recovery and RT-PCR amplification, a systematic NGS enrichment analysis was performed to calculate the fold enrichment ratio relative to the TTN-002 control, and the peptides comprised within the variants were identified.

[1512] Following the RNA recovery and NGS analysis from the second maturation approach, the matured capsid variants were filtered based on their coefficient of variance (CV), which was calculated for each peptide across the brain, heart, liver, muscle and DRG samples taken from the two NHPs. Those that had a CV value <2 were identified, as these were the peptides that were reliably detected in the majority of samples isolated from the brains of the two NHPs.

[1513] Table 17 provides the peptide sequences of these matured capsid variants and the fold enrichment of the matured capsid variant relative to the non-matured TTN-002 control that demonstrated the greatest fold-change in expression relative to the non-matured TTN-002 capsid variant in the brain of NHPs, following the first maturation approach and the second maturation approach. As shown in Table 17, following the first maturation approach, approximately 5 TTN-002 matured capsid variants demonstrated an increase in expression relative to the non-matured TTN-002 control, which demonstrated at least a 5-fold to 53-fold increase in expression in the NHP brain relative to the non-matured TTN-002 control. Following the second maturation approach, approximately 38 TTN-002 matured capsid variants demonstrated an increase in expression in the NHP brain relative to the non-matured TTN-002 control, with at least 27 demonstrating at least a 2-fold increase in expression (Table 17). Several variants demonstrated at least a 12-fold to 222-fold increase in expression in the NHP brain relative to the non-matured TTN-002 control (Table 17).

[1514] Fold-change in expression for the TTN-002 matured variants in Table 17 were also calculated for the DRG, muscle, liver (RNA and DNA), and heart of the NHPs following each maturation approach. Several variants that led to increased expression relative to the non-matured TTN-002 variant in the brain of the NHP also led to increased expression in other tissues. For instance, the matured TTN-002 capsid variant comprising the amino acid sequence TNNQSSYTPSLVQKTA (SEQ ID NO: 1585) demonstrated increased expression in the brain, heart, and liver relative to the non-matured TTN-002 control. Similarly, the matured TTN-002 capsid variants comprising the amino acid sequence TNNQSSYPPSLVKKTA (SEQ ID NO: 1591) and TNNQSSYPPSLVQKPA (SEQ ID NO: 1593), demonstrated increased expression in the brain and heart relative to the non-matured TTN-002 control. Additionally, the matured TTN-002 capsid variant comprising the amino acid sequence INNQSSYPAEVVQKTA (SEQ ID NO: 1024) demonstrated increased expression in the brain and the muscle relative to the non-matured TTN-002 control. Also, as shown in Table 17, many of the TTN-002 capsid variants that had increased expression in the brain, were de-targeted in the DRG. Therefore, several matured variants demonstrated increased tropism in more than one tissue type in the NHPs, with many showing reduced expression in the DRG.

TABLE 17
NGS fold-enrichment of the TTN-002 matured AAV capsid variants in the brain of
NHPs following first and second mutagenesis approaches as compared to other NHP and mouse
tissues

| | | Fold Enrichment relative to TTN-002 | | | | | | |
|---|---|---|---|---|---|---|---|---|
| | SEQ | | | Liver | Liver | | | |
| | ID | Brain | DRG | RNA | DNA | Heart | Muscle | Brain |
| Sequence | NO: | (NHP) | (NHP) | (NHP) | (NHP) | (NHP) | (NHP) | (Mouse) |

First Maturation Approach

| | | | | | | | | |
|---|---|---|---|---|---|---|---|---|
| TNNQSKYPAEVVQKTA | 1538 | 53.751 | 0.000 | 2.270 | 0.518 | 0.000 | 0.000 | 10.261 |
| TNNTSLYPAEVVQKTA | 1232 | 22.903 | 0.000 | 2.824 | 0.000 | 0.000 | 0.000 | 1.484 |
| TNNSSSYPAEVVQKTA | 1539 | 19.002 | 0.000 | 1.240 | 0.000 | 0.000 | 0.000 | 8.539 |
| TNNQSRYPAEVVQKTA | 1327 | 8.499 | 0.000 | 0.846 | 0.516 | 0.000 | 0.000 | 1.704 |
| TNNQSSYPPSLVQKTA | 1300 | 5.458 | 0.000 | 0.966 | 0.000 | 5.100 | 0.000 | 1.141 |
| TNNQSSYPAEVVQKTA | 1533 | 1.000 | 1.000 | 1.000 | 1.000 | 1.000 | 1.000 | 1.000 |

Second Maturation Approach

| | | | | | | | | |
|---|---|---|---|---|---|---|---|---|
| TNNAGAYPAEVVQKTA | 1021 | 222.785 | 0.000 | 0.000 | 0.000 | 0.000 | 0.000 | 19.342 |
| TNNIGSYPAEVVQKTA | 1112 | 93.586 | 0.000 | 0.000 | 0.142 | 0.000 | 0.000 | 7.845 |
| TNTASSYPAEVVQKTA | 1575 | 46.343 | 0.000 | 0.019 | 2.353 | 0.234 | 0.000 | 0.012 |
| TNNTSLYPAEVVQKTA | 1232 | 45.861 | 0.000 | 5.118 | 0.432 | 0.059 | 0.087 | 3.828 |
| TNNLGSYPAEVVQKTA | 1027 | 44.023 | 0.000 | 0.000 | 0.156 | 0.000 | 0.000 | 17.430 |
| TNNQSTNKAEVVQKTA | 1578 | 42.633 | 0.000 | 0.268 | 4.032 | 0.000 | 0.000 | 0.000 |
| TNNHSSYPAEVVQKTA | 1310 | 38.584 | 0.000 | 0.275 | 0.430 | 0.076 | 0.000 | 2.600 |
| TNNQSKYPAEVVQKTA | 1538 | 20.857 | 0.000 | 2.180 | 1.568 | 0.001 | 0.000 | 5.468 |
| TNNSSSYTAEVVQKTA | 1214 | 19.625 | 0.000 | 0.000 | 2.152 | 0.000 | 0.000 | 4.204 |
| TNNQSKYPAEVEQKTA | 1254 | 15.501 | 0.000 | 3.630 | 0.000 | 0.000 | 0.000 | 3.434 |
| TNNTSLYPAEEVQKTA | 1583 | 14.603 | 0.000 | 1.276 | 0.000 | 0.000 | 0.000 | 1.249 |
| TNTASSYQAEVVQKTA | 1584 | 13.180 | 0.000 | 0.000 | 0.000 | 0.000 | 0.000 | 0.000 |
| TNNQSSYTPSLVQKTA | 1585 | 12.552 | 0.000 | 5.700 | 2.591 | 24.396 | 0.000 | 1.831 |
| TNNQSSYPPSLVQKTA | 1300 | 9.123 | 0.000 | 2.178 | 1.093 | 20.059 | 0.052 | 2.719 |
| TNNQSRYPAEVVQKTA | 1327 | 8.503 | 0.000 | 1.887 | 1.125 | 0.002 | 0.000 | 2.409 |
| TNNSSSYPAEVVQKTA | 1539 | 8.092 | 0.267 | 0.854 | 0.904 | 0.003 | 0.000 | 5.903 |
| TNNQSRYPAEEVQKTA | 1342 | 7.267 | 0.000 | 0.879 | 0.783 | 0.000 | 0.000 | 2.233 |
| TNNQSSYPPSLEQKTA | 1590 | 6.924 | 0.000 | 1.616 | 0.000 | 8.962 | 0.000 | 1.550 |
| TNNQSSYPPSLVKKTA | 1591 | 6.625 | 0.000 | 0.000 | 0.891 | 10.953 | 0.000 | 1.783 |
| TNNLSSYQAEVVQKTA | 1592 | 5.913 | 276.643 | 0.000 | 0.000 | 0.000 | 0.000 | 1.280 |
| TNNQSSYPPSLVQKPA | 1593 | 5.789 | 0.000 | 2.977 | 1.161 | 25.392 | 0.000 | 3.704 |
| TNNSSSYPAEVVKKTA | 1331 | 4.191 | 0.000 | 0.766 | 0.521 | 0.000 | 0.000 | 2.340 |
| TNNQSKYPAEVVHKTA | 1453 | 3.201 | 0.000 | 0.766 | 0.000 | 0.000 | 0.000 | 1.402 |
| TNNSSSYPAEVVQKPA | 1142 | 2.748 | 0.000 | 0.794 | 0.000 | 0.000 | 0.000 | 6.889 |
| INNQSSYPAEVVQKTA | 1024 | 2.472 | 0.000 | 0.992 | 0.695 | 0.275 | 75.541 | 18.426 |
| TNNHSSYPAAVVQKTA | 1598 | 2.007 | 0.000 | 0.000 | 0.000 | 0.000 | 0.000 | 0.587 |
| TNSQSSNPAEVVQKTA | 1599 | 1.829 | 0.000 | 0.000 | 0.000 | 0.000 | 0.000 | 0.116 |
| TNNSSSYPAEVVQQTA | 1419 | 1.645 | 0.000 | 0.510 | 0.000 | 0.000 | 0.000 | 1.571 |
| NNNQSRYPAEVVQKTA | 1601 | 1.513 | 0.000 | 0.565 | 0.000 | 0.000 | 0.000 | 0.480 |
| TNNQSSYTAEVVQKNA | 1602 | 1.350 | 0.000 | 0.000 | 0.891 | 0.000 | 0.000 | 0.159 |
| TNNTSLCPAEVVQKTA | 1603 | 1.307 | 0.000 | 0.851 | 0.000 | 0.000 | 0.000 | 0.132 |
| TNNQRSYTAEVVQKTA | 1604 | 1.186 | 0.000 | 2.836 | 2.348 | 0.000 | 0.000 | 0.407 |
| TNSTSLYPAEVVQKTA | 1605 | 1.186 | 0.000 | 0.000 | 0.000 | 0.000 | 0.000 | 0.196 |
| TNNQSSYTAEVVKKTA | 1606 | 1.143 | 0.000 | 0.839 | 2.325 | 0.000 | 0.000 | 0.697 |
| TNNHSSYPAEVLQKTA | 1607 | 1.136 | 0.000 | 0.000 | 0.000 | 0.000 | 0.000 | 0.163 |
| TNNQSSYQAEEVQKTA | 1608 | 1.113 | 0.000 | 0.000 | 0.000 | 0.000 | 0.000 | 0.561 |
| TNNQSSYPAEVVQKTA | 1533 | 1.000 | 1.000 | 1.000 | 1.000 | 1.000 | 1.000 | 1.000 |
| TNNKSKYPAEVVQKTA | 1610 | 0.980 | 0.000 | 0.000 | 2.953 | 0.000 | 0.000 | 0.600 |
| TNNQSRYPAEVMQKTA | 1611 | 0.967 | 0.000 | 0.000 | 0.000 | 0.000 | 0.000 | 0.085 |
| TNSTSPYPAEVVQKTA | 1612 | 0.880 | 0.000 | 0.000 | 0.000 | 0.000 | 0.000 | 0.211 |
| TNNQSSYPAWLIQKTA | 1613 | 0.713 | 0.000 | 0.000 | 0.000 | 0.000 | 0.000 | 0.091 |
| TNNQSSYPAEATKKTA | 1614 | 0.693 | 0.000 | 0.408 | 6.529 | 0.000 | 0.000 | 0.000 |
| TNKQSSYTAEVVQKTA | 1615 | 0.678 | 0.000 | 0.000 | 1.151 | 0.000 | 0.000 | 0.240 |
| TNKIGSYPAEVVQKTA | 1616 | 0.660 | 0.000 | 0.000 | 0.812 | 0.000 | 0.000 | 0.046 |
| TNNKSRYPAEVVQKTA | 1617 | 0.648 | 0.000 | 5.889 | 2.080 | 3.490 | 0.000 | 0.467 |
| TNNQSSYPAEVVQKTD | 1618 | 0.646 | 0.000 | 0.756 | 1.247 | 0.945 | 3.270 | 0.530 |
| TNNQSSYPAEVVQKNA | 1619 | 0.640 | 4.200 | 3.327 | 3.647 | 0.622 | 3.655 | 0.505 |
| TNNQRKYPAEVVQKTA | 1620 | 0.629 | 0.000 | 6.158 | 2.709 | 0.000 | 0.000 | 0.171 |
| TNNQSSNPAEEVQKTA | 1621 | 0.617 | 0.000 | 0.000 | 0.989 | 0.000 | 0.000 | 0.449 |
| NNNQSSYPAEVVQKTA | 1622 | 0.546 | 0.000 | 1.197 | 1.528 | 1.025 | 58.686 | 0.750 |
| TNNQSYYPAEEVQKTA | 1623 | 0.537 | 0.000 | 0.000 | 0.000 | 0.000 | 0.000 | 0.365 |
| TKNHSSYPAEVVQKTA | 1624 | 0.522 | 0.000 | 0.000 | 0.845 | 0.000 | 0.000 | 0.062 |
| TNNQASYPAEVVQKTA | 1586 | 88.651 | | | | | | |
| TNKQASYPAEVVQKTA | 1587 | 1.100 | | | | | | |

[1515] Furthermore, several of the TTN-002 matured capsid variants demonstrating an increase in expression relative to the non-matured TTN-002 control following the first and second maturation approaches in the brain of NHPs as shown in Table 17, also demonstrated an increase in expression in the brain of mice following the first and second maturation approach in mice. For instance, the matured TTN-002 capsid variant comprising the amino acid sequence TNNQSKYPAEVVQKTA (SEQ ID NO: 1538) demonstrated a 53.7-fold increase in expression relative to the non-matured TTN-002 following the first maturation approach in brain of NHPs, demonstrated a 20.86-fold increase in expression relative to the non-matured TTN-002 following the second maturation approach in brain of NHPs, a 10.26-fold increase in expression relative to the non-matured TTN-002 following the first maturation approach in brain of mice, and a 5.47-fold increase in increase in expression relative to the non-matured TTN-002 following the second maturation approach in brain of mice. Similarly, the matured TTN-002 capsid variant comprising the amino acid sequence TNNSSSYPAEVVQKTA (SEQ ID NO: 1539) demonstrated an 18.997-fold increase in expression relative to the non-matured TTN-002 following the first maturation approach in brain of NHPs, an 8.093-fold increase in expression relative to the non-matured TTN-002 following the second maturation approach in brain of NHPs, an 8.539-fold increase in expression relative to the non-matured TTN-002 following the first maturation approach in brain of mice, and a 5.903-fold increase in increase in expression relative to the non-matured TTN-002 following the second maturation approach in brain of mice. Matured TTN-002 capsid variants comprising the amino acid sequences of SEQ ID NOs: 1021, 1024, 1027, 1112, 1142, 1214, 1232, 1254, 1300, 1310, 1327, 1331, 1342, and 1593 also demonstrated an increase in expression in the brain of both NHPs and mice, relative to the non-matured TTN-002 control. Therefore, several matured variants demonstrated increased expression relative to the non-matured controls in at least two different species, indicating cross-species tropism.

[1516] Table 18 provides the peptide sequences of these matured capsid variants, and the fold enrichment of the matured capsid variant relative to the non-matured TTN-002 control that demonstrated increased expression in the heart of NHPs following the second maturation approach. As shown in Table 18, approximately 17 TTN-002 matured capsid variants demonstrated an increase in expression in the heart relative to the non-matured TTN-002 control, with at least 13 demonstrating at least a 2-fold increase in expression. Several variants demonstrated at least a 10-fold to 47-fold increase in expression in the heart relative to the non-matured TTN-002 control. Fold-change in expression for the TTN-002 matured variants in Table 18 were also calculated for the brain, DRG, muscle, and liver (RNA and DNA), of the NHPs and in the brains of mice.

TABLE 18
NGS fold-enrichment of the TTN-002 matured AAV capsid variants in the heart of
NHPs following the second mutagenesis approach as compared to other NHP and mouse tissues

| | | Fold Enrichment relative to TTN-002 | | | | | | |
|---|---|---|---|---|---|---|---|---|
| | SEQ | | | | Liver | Liver | | |
| | ID | Heart | Brain | DRG | RNA | DNA | Muscle | Brain |
| Sequence | NO | (NHP) | (NHP) | (NHP) | (NHP) | (NHP) | (NHP) | (Mouse) |
| TNSSLSYQAEVVQKTA | 2064 | 47.380 | 0.000 | 0.000 | 0.000 | 0.000 | 0.000 | 0.000 |
| TNSSLSYTAEVVQKTA | 2065 | 45.827 | 0.066 | 0.000 | 4.885 | 8.710 | 0.000 | 0.000 |
| TNSSLYYPAEVVQKTA | 2066 | 41.710 | 0.000 | 0.000 | 0.000 | 0.000 | 0.000 | 0.000 |
| TNTSATYPAEVVQKTA | 2067 | 35.136 | 0.000 | 0.000 | 0.000 | 0.756 | 0.000 | 0.476 |
| TNSSLSYPAEVVQKTA | 2068 | 32.805 | 0.015 | 0.000 | 0.744 | 2.122 | 0.000 | 0.002 |
| TNSSLSYPAEEVQKTA | 2069 | 23.357 | 0.000 | 0.000 | 0.000 | 0.000 | 0.000 | 0.000 |
| TNSSLSYPAEVVQKTD | 2070 | 18.293 | 0.000 | 0.000 | 0.000 | 0.000 | 0.000 | 0.000 |
| TNSSLSYPAEVVQNTA | 2071 | 17.081 | 0.000 | 0.000 | 0.000 | 0.000 | 0.000 | 0.000 |
| TNSSLSYPAEVVQKNA | 2072 | 13.129 | 0.000 | 0.000 | 0.000 | 0.000 | 0.000 | 0.000 |
| TNSSLSYPAEVVQKPA | 2073 | 13.115 | 0.000 | 0.000 | 0.000 | 0.521 | 0.000 | 0.000 |
| TNNQTSTEAEVVQKTA | 2074 | 10.056 | 0.000 | 0.000 | 0.000 | 0.000 | 0.000 | 0.000 |
| TNKSATYPAEVVQKTA | 2075 | 9.090 | 0.000 | 0.000 | 0.000 | 0.000 | 0.000 | 0.000 |
| TNSSLSYPADVVQKTA | 2076 | 4.692 | 0.000 | 0.000 | 0.000 | 0.384 | 0.000 | 0.000 |
| TNNQSSYPAEVVQKTA | 1533 | 1.000 | 1.000 | 1.000 | 1.000 | 1.000 | 1.000 | 1.000 |
| TNNQSSYPAEVVQKNA | 2078 | 0.622 | 0.640 | 4.200 | 3.327 | 3.647 | 3.655 | 0.505 |
| TNNQSSYPSTDVQKTA | 2079 | 0.572 | 0.020 | 0.000 | 0.000 | 3.216 | 0.000 | 0.000 |
| TNNKGLYPAEVVQKTA | 2080 | 0.506 | 0.000 | 0.000 | 0.000 | 5.411 | 0.000 | 0.002 |

[1517] Table 19 provides the peptide sequences of these matured capsid variants, and the fold enrichment of the matured capsid variant relative to the non-matured TTN-002 control that demonstrated increased expression in the muscle of NHPs following the second maturation approach. As shown in Table 19, approximately 33 TTN-002 matured capsid variants demonstrated an increase in expression in the muscle relative to the non-matured TTN-002 control, with at least 19 demonstrating at least a 2-fold increase in expression. Several variants demonstrated at least a 7-fold to 38-fold increase in expression in the muscle relative to the non-matured TTN-002 control. Fold-change in expression for the TTN-002 matured variants in Table 19 were also calculated for the brain, DRG, heart, and liver (RNA and DNA), of the NHPs and in the brains of mice.

TABLE 19
NGS fold-enrichment of the TTN-002 matured AAV capsid variants in the muscle of
NHPs following the second mutagenesis approach

| | | Fold Enrichment relative to TTN-002 | | | | | | |
|---|---|---|---|---|---|---|---|---|
| | SEQ | | | | Liver | Liver | | |
| | ID | Muscle | Brain | DRG | RNA | DNA | Heart | Brain |
| Sequence | NO | (NHP) | (NHP) | (NHP) | (NHP) | (NHP) | (NHP) | (Mouse) |
| TNNQSSYDFTVVQKTA | 2024 | 38.128 | 0.000 | 267911.1 | 0.000 | 4.209 | 0.032 | 0.000 |
| TNNQSSYPAEVVQNVG | 2025 | 20.373 | 0.000 | 82501.777 | 7.770 | 0.000 | 0.015 | 0.000 |
| TNNQSPHAAEVVQKTA | 2026 | 9.977 | 0.000 | 85036.503 | 2.478 | 0.841 | 0.009 | 0.003 |
| TNNLHVYPAEVVQKTA | 2027 | 9.969 | 0.000 | 59488.293 | 0.000 | 0.934 | 0.006 | 0.000 |
| TLKTSSYPAEVVQKTA | 2028 | 9.646 | 0.000 | 69692.245 | 0.032 | 1.906 | 0.155 | 0.000 |
| TNNQAASPAEVVQKTA | 2029 | 7.483 | 0.000 | 147630.5 | 0.000 | 1.848 | 0.023 | 0.000 |
| TNLSMSYPAEVVQKTA | 2030 | 5.960 | 0.000 | 67462.229 | 0.220 | 1.697 | 0.014 | 0.005 |
| TKAFSSYPAEVVQKTA | 2031 | 5.743 | 0.000 | 42730.728 | 0.000 | 0.919 | 0.000 | 0.000 |
| TAYQSSYPAEVVQKTA | 2032 | 4.703 | 0.000 | 61779.917 | 0.022 | 1.908 | 0.000 | 0.000 |
| TNNQSQHQAEVVQKTA | 2033 | 4.510 | 127.1 | 107992.3 | 3.186 | 4.569 | 0.015 | 0.000 |
| TNNQSSVQLEVVQKTA | 2034 | 3.846 | 0.000 | 54250.016 | 7.862 | 4.173 | 0.013 | 0.000 |
| TNNQSSAFAEVVQKTA | 2035 | 3.503 | 32.731 | 67253.425 | 3.207 | 5.348 | 0.004 | 0.000 |
| TNNQSAVLAEVVQKTA | 2036 | 3.351 | 0.000 | 28296.228 | 2.069 | 3.784 | 0.007 | 0.000 |
| LNAQSSYPAEVVQKTA | 2037 | 3.311 | 0.000 | 76314.798 | 0.000 | 0.476 | 0.000 | 0.000 |
| TNNQSQSSAEVVQKTA | 2038 | 3.310 | 0.000 | 198372.9 | 2.579 | 0.766 | 0.007 | 0.003 |
| TNNQSSLHAEVVQKTA | 2039 | 2.685 | 0.013 | 23403.089 | 4.165 | 4.578 | 0.005 | 0.001 |
| TNNFQLYPAEVVQKTA | 2040 | 2.460 | 0.000 | 28791.699 | 0.000 | 0.053 | 0.000 | 0.000 |
| TNNQSSYPAEVVQSMR | 2041 | 2.099 | 0.000 | 176004.5 | 0.000 | 0.000 | 0.000 | 0.000 |
| TLLYSSYPAEVVQKTA | 2042 | 2.044 | 0.000 | 8688.765 | 0.000 | 2.362 | 0.006 | 0.000 |
| TNNQSSTLDEVVQKTA | 2043 | 1.947 | 0.000 | 0.000 | 0.000 | 0.043 | 397.2 | 0.001 |
| TNNQTTTPAEVVQKTA | 2044 | 1.839 | 0.000 | 59308.623 | 1.658 | 2.863 | 0.003 | 0.004 |
| TNNQSSYPAEVVELLA | 2045 | 1.800 | 0.000 | 12934.481 | 0.000 | 0.175 | 0.004 | 0.000 |
| TNNQVNYPAEVVQKTA | 2046 | 1.694 | 0.000 | 0.000 | 12.363 | 2.400 | 0.000 | 0.000 |
| TTSTSSYPAEVVQKTA | 2047 | 1.576 | 0.002 | 42212.609 | 8.264 | 2.618 | 0.000 | 0.003 |
| TNNQSSYPQIAVQKTA | 2048 | 1.506 | 0.000 | 0.000 | 28.933 | 3.364 | 0.000 | 0.000 |
| TNNQSSYPAENLPKTA | 2049 | 1.327 | 0.000 | 56068.064 | 0.000 | 2.002 | 0.000 | 0.008 |
| TNNQSSYPASSPQKTA | 2050 | 1.304 | 0.000 | 0.000 | 1.637 | 1.814 | 466.4 | 0.000 |
| TNNQFMVPAEVVQKTA | 2051 | 1.151 | 0.000 | 63928.318 | 0.000 | 2.409 | 0.000 | 0.000 |
| TNNTTTYPAEVVQKTA | 2052 | 1.121 | 0.073 | 12941.562 | 0.719 | 0.808 | 0.065 | 0.008 |
| TPSKSSYPAEVVQKTA | 2053 | 1.083 | 0.000 | 1.366 | 7.344 | 1.632 | 0.000 | 0.000 |
| TNYLMSYPAEVVQKTA | 2054 | 1.078 | 0.000 | 24113.689 | 0.000 | 1.271 | 0.382 | 0.000 |
| TNLAMSYPAEVVQKTA | 2055 | 1.074 | 0.000 | 77469.008 | 0.701 | 1.184 | 0.000 | 0.006 |
| TNNQSSLMQEVVQKTA | 2056 | 1.057 | 0.000 | 0.000 | 21.968 | 3.563 | 0.000 | 0.000 |
| TNNQSSYPNAIVQKTA | 2057 | 0.960 | 0.000 | 0.000 | 0.077 | 0.929 | 0.019 | 0.000 |
| TNNQSSYPAEVRTATA | 2058 | 0.915 | 0.000 | 0.000 | 30.158 | 1.431 | 0.000 | 0.000 |
| TNNQSSSMTEVVQKTA | 2059 | 0.788 | 66.451 | 33379.460 | 1.383 | 3.930 | 0.000 | 0.000 |
| TNLSPSYPAEVVQKTA | 2060 | 0.778 | 0.008 | 11925.049 | 2.716 | 1.300 | 0.000 | 0.000 |
| TNNQSSYPAESSRKTA | 2061 | 0.657 | 0.000 | 0.000 | 7.755 | 3.289 | 377.3 | 0.000 |
| TNNPLTYPAEVVQKTA | 2062 | 0.641 | 0.000 | 18890.829 | 0.000 | 1.060 | 0.000 | 0.000 |
| TNNLSTYPAEVVQKTA | 2063 | 0.595 | 0.029 | 32495.446 | 0.000 | 1.113 | 0.065 | 0.013 |

[1518] Table 20 provides the peptide sequences of these matured capsid variants, and the fold enrichment of the matured capsid variant relative to the non-matured TTN-002 control that demonstrated increased expression in the liver of NHPs following the first and second maturation approach. As shown in Table 20, following the first maturation approach, approximately 7 TTN-002 matured capsid variants demonstrated an 11-fold to 189-fold increase in expression in the liver relative to the non-matured TTN-002 control. Following the second maturation approach, approximately 395 TTN-002 matured capsid variants demonstrated an increase in expression in the liver of at least 9-fold relative to the non-matured TTN-002 control (Table 20). Several variants demonstrated at least a 50-fold to 114-fold increase in expression in the liver relative to the non-matured TTN-002 control (Table 20). Fold-change in expression for the TTN-002 matured variants in Table 20 were also calculated for the brain, DRG, heart, and muscle of the NHPs and in the brains of mice.

TABLE 20
NGS fold-enrichment of the TTN-002 matured AAV capsid variants in the liver of
NHPs following both mutagenesis approaches

| | | Fold Enrichment relative to TTN-002 | | | | | | |
|---|---|---|---|---|---|---|---|---|
| | SEQ | Liver | Liver | | | | | |
| | ID | RNA | DNA | Brain | DRG | Heart | Muscle | Brain |
| Sequence | NO | (NHP) | (NHP) | (NHP) | (NHP) | (NHP) | (NHP) | (Mouse) |

First Maturation Approach

| | | | | | | | | |
|---|---|---|---|---|---|---|---|---|
| TDYHRGDPAKVVQKSA | 1625 | 189.324 | 0.000 | 0.000 | 0.000 | 0.000 | 0.000 | 0.000 |
| TNKQKFSLTEELQKNA | 1626 | 101.263 | 5.032 | 0.000 | 0.000 | 0.000 | 0.000 | 0.000 |
| GKTPRHFTQQVVQENA | 1627 | 84.647 | 1.661 | 0.000 | 0.000 | 0.000 | 0.000 | 0.000 |
| SENERSDTSVVVAQIL | 1628 | 56.534 | 0.000 | 0.000 | 0.000 | 0.000 | 0.000 | 0.000 |
| TNNQSSIRLEVVQKTA | 1629 | 13.829 | 2.357 | 0.000 | 0.000 | 0.000 | 0.000 | 0.000 |
| TNNQSSSLAEVVQKTA | 1630 | 11.832 | 4.625 | 29.220 | 0.000 | 0.000 | 0.000 | 0.000 |
| TNNQSGPTAEVVQKTA | 1631 | 11.391 | 0.000 | 0.000 | 0.000 | 0.000 | 0.000 | 1.678 |

Second Maturation Approach

| | | | | | | | | |
|---|---|---|---|---|---|---|---|---|
| TNNQSSYPAEAPKKTA | 1632 | 114.219 | 5.207 | 419.144 | 0.000 | 0.000 | 0.000 | 0.000 |
| TNNQSSYPRKVVQKTA | 1633 | 104.291 | 0.000 | 0.000 | 0.000 | 0.000 | 0.000 | 0.045 |
| TNNQSRIQAEVVQKTA | 1634 | 94.646 | 4.673 | 0.000 | 0.000 | 0.000 | 0.182 | 0.001 |
| TNNQSWHQAEVVQKTA | 1635 | 90.698 | 8.068 | 0.000 | 0.000 | 0.000 | 0.000 | 0.000 |
| TNNQSGPTAEVVQKTA | 1631 | 78.597 | 5.825 | 0.000 | 0.000 | 0.005 | 0.000 | 5.645 |
| NEWQSSYPAEVVQKTA | 1636 | 73.960 | 0.000 | 0.000 | 0.000 | 0.000 | 0.000 | 0.000 |
| TNNQSIKWAEVVQKTA | 1637 | 73.487 | 1.668 | 0.000 | 0.000 | 0.000 | 0.000 | 0.000 |
| TNNQSSYPAEVVNIQA | 1638 | 71.285 | 0.000 | 0.000 | 0.000 | 0.000 | 0.000 | 0.000 |
| TNNQSSYPAHNSQKTA | 1639 | 71.153 | 1.854 | 0.000 | 0.000 | 0.000 | 0.000 | 0.000 |
| TNNQSSYPAEVVQYQD | 1640 | 67.017 | 0.000 | 0.000 | 0.000 | 0.000 | 0.000 | 0.000 |
| TNNQSSRQQEVVQKTA | 1641 | 63.063 | 7.092 | 0.002 | 0.000 | 0.000 | 0.660 | 0.000 |
| TNNQNCSPAEVVQKTA | 1642 | 59.544 | 0.951 | 0.000 | 0.000 | 0.000 | 0.000 | 0.000 |
| TNNQSSYPAERSHKTA | 1643 | 53.889 | 4.190 | 0.000 | 0.000 | 0.000 | 0.000 | 0.004 |
| TVNRSSYPAEVVQKTA | 1644 | 53.711 | 6.381 | 0.000 | 0.000 | 0.000 | 0.000 | 0.000 |
| TNNQHGGPAEVVQKTA | 1645 | 53.380 | 0.565 | 0.000 | 0.000 | 0.000 | 0.000 | 0.000 |
| TNNQSMIWAEVVQKTA | 1646 | 52.362 | 1.443 | 0.000 | 0.000 | 0.000 | 0.000 | 0.000 |
| TNNQSSYPAEASRKTA | 1647 | 49.543 | 3.268 | 0.000 | 0.000 | 0.040 | 0.000 | 0.000 |
| TNNQSSYPAHLTQKTA | 1648 | 49.237 | 4.942 | 0.000 | 0.000 | 0.000 | 0.000 | 0.000 |
| TNNRRGYPAEVVQKTA | 1649 | 48.153 | 0.000 | 0.000 | 0.000 | 0.000 | 0.000 | 0.000 |
| TNNKRIYPAEVVQKTA | 1650 | 48.033 | 0.000 | 0.000 | 0.000 | 0.000 | 0.000 | 0.000 |
| TNNQGALPAEVVQKTA | 1651 | 47.761 | 1.178 | 0.000 | 0.000 | 0.000 | 0.000 | 0.036 |
| TNNQSSYPAEASKKTA | 1652 | 44.984 | 6.761 | 0.010 | 0.000 | 0.000 | 0.000 | 0.000 |
| TGQHSSYPAEVVQKTA | 1653 | 43.610 | 2.355 | 0.000 | 0.000 | 0.000 | 0.000 | 35.110 |
| TNNQSSIVQEVVQKTA | 1654 | 43.603 | 5.228 | 0.000 | 0.000 | 0.000 | 0.000 | 0.000 |
| TNNQSSYPAERNTKTA | 1655 | 43.470 | 5.264 | 0.000 | 0.000 | 0.007 | 0.000 | 0.000 |
| TNNQSSYPAQALQKTA | 1656 | 43.207 | 2.932 | 0.000 | 0.000 | 0.000 | 0.000 | 0.000 |
| TNNQSRRGAEVVQKTA | 1657 | 42.384 | 2.205 | 0.000 | 0.000 | 0.000 | 0.000 | 0.000 |
| TNNQSSYPQVMVQKTA | 1658 | 42.160 | 0.019 | 0.000 | 0.000 | 0.000 | 0.000 | 0.000 |
| TNNQSSQKREVVQKTA | 1659 | 42.065 | 5.253 | 0.000 | 0.000 | 0.000 | 0.000 | 0.000 |
| TNNQSSYPAENARKTA | 1660 | 42.025 | 4.024 | 0.000 | 0.000 | 0.000 | 0.000 | 0.000 |
| TNNQSSYPAGTGQKTA | 1661 | 41.566 | 3.734 | 0.000 | 0.000 | 0.000 | 0.000 | 0.000 |
| TRMPSSYPAEVVQKTA | 1662 | 40.545 | 2.585 | 0.000 | 0.000 | 0.000 | 0.000 | 0.002 |
| TNNQSSPISEVVQKTA | 1663 | 39.647 | 1.460 | 0.000 | 0.000 | 0.000 | 0.000 | 0.000 |
| TNNQSSYGAVVVQKTA | 1664 | 39.126 | 1.251 | 0.000 | 0.000 | 0.000 | 0.385 | 0.000 |
| TNNQSSYPAEQPVKTA | 1665 | 38.694 | 1.536 | 0.000 | 0.000 | 0.000 | 0.000 | 0.000 |
| TNNQSSGYREVVQKTA | 1666 | 37.888 | 3.088 | 0.000 | 0.000 | 0.003 | 0.000 | 0.000 |
| TNNQSGAQAEVVQKTA | 1667 | 37.624 | 5.498 | 0.000 | 0.000 | 0.000 | 0.000 | 0.000 |
| TNNQSSKGREVVQKTA | 1668 | 37.172 | 2.348 | 0.000 | 0.000 | 0.000 | 0.000 | 0.000 |
| TNNQSSYPAESKHKTA | 1669 | 36.198 | 1.594 | 0.000 | 0.000 | 0.000 | 0.000 | 0.000 |
| TNNQSSYNMRVVQKTA | 1670 | 35.863 | 0.000 | 0.000 | 0.000 | 0.000 | 0.000 | 0.000 |
| TNNQSSYPAEKNTKTA | 1671 | 34.039 | 2.322 | 0.000 | 0.000 | 0.000 | 0.000 | 0.083 |
| TNNQSSYPAERREKTA | 1672 | 33.598 | 12.673 | 0.000 | 0.000 | 0.000 | 0.000 | 0.000 |
| TNNQWWMPAEVVQKTA | 1673 | 33.472 | 0.000 | 0.000 | 0.000 | 0.000 | 0.000 | 0.000 |
| TNNQSYTHAEVVQKTA | 1674 | 33.128 | 4.433 | 0.000 | 0.000 | 0.000 | 0.000 | 0.004 |
| TNNAAKYPAEVVQKTA | 1675 | 32.786 | 3.029 | 0.009 | 0.000 | 0.000 | 0.330 | 0.007 |
| TNNQSSYPLVCVQKTA | 1676 | 32.659 | 0.000 | 0.000 | 0.000 | 0.000 | 0.000 | 0.000 |
| TNNQSNAYAEVVQKTA | 1677 | 32.331 | 0.978 | 0.000 | 0.000 | 0.000 | 0.000 | 0.000 |
| TGVKSSYPAEVVQKTA | 1678 | 32.102 | 0.884 | 0.000 | 0.000 | 0.000 | 0.000 | 0.000 |
| TNNQSSKKTEVVQKTA | 1679 | 31.801 | 10.223 | 0.000 | 0.000 | 0.012 | 0.000 | 0.000 |
| TNNQSSYPAEMANKTA | 1680 | 31.613 | 3.467 | 0.000 | 0.000 | 0.000 | 0.000 | 0.000 |
| TNNQSSYPASMGQKTA | 1681 | 30.875 | 3.131 | 0.002 | 0.000 | 0.000 | 0.000 | 0.000 |
| TNNQSSYPAPGIQKTA | 1682 | 30.648 | 1.520 | 0.000 | 0.000 | 0.000 | 0.000 | 0.015 |
| TNNQSSYPAQDKQKTA | 1683 | 30.569 | 0.444 | 0.000 | 0.000 | 0.000 | 0.000 | 0.000 |
| TNNQSSYPERQVQKTA | 1684 | 30.436 | 6.881 | 0.000 | 0.000 | 0.000 | 0.000 | 0.000 |
| TNNQSSYPASQSQKPA | 1685 | 30.284 | 0.810 | 0.000 | 0.000 | 0.000 | 0.000 | 0.000 |
| TNNQSQGTAEVVQKTA | 1686 | 30.072 | 2.154 | 0.002 | 0.000 | 0.000 | 0.000 | 0.014 |
| TNNQPRLPAEVVQKTA | 1687 | 29.628 | 2.410 | 0.000 | 0.000 | 0.014 | 0.000 | 0.003 |
| TNNQSSYPAELGKKTA | 1688 | 29.441 | 5.305 | 0.000 | 0.000 | 0.000 | 0.000 | 0.009 |
| TNNQSSLTKEVVQKTA | 1689 | 29.297 | 2.313 | 0.000 | 0.000 | 0.000 | 0.000 | 0.001 |
| ELCQSSYPAEVVQKTA | 1690 | 29.051 | 0.000 | 0.000 | 0.000 | 0.000 | 0.000 | 0.000 |
| TNNQSSYPVSRVQKTA | 1691 | 28.960 | 1.001 | 0.000 | 0.000 | 0.000 | 0.000 | 0.000 |
| TNNQSSHHQEVVQKTA | 1692 | 28.825 | 3.732 | 0.000 | 0.000 | 0.000 | 0.000 | 0.000 |
| TNNQWCSPAEVVQKTA | 1693 | 28.739 | 0.354 | 0.000 | 0.000 | 0.000 | 0.000 | 0.000 |
| TNNQSSYPAEVVQREY | 1694 | 28.521 | 0.000 | 0.000 | 0.000 | 0.000 | 0.000 | 0.000 |
| THKSSSYPAEVVQKTA | 1695 | 28.280 | 1.162 | 0.000 | 0.000 | 0.000 | 0.000 | 0.010 |
| TGNVSSYPAEVVQKTA | 1696 | 28.028 | 0.000 | 0.000 | 0.000 | 0.000 | 0.000 | 0.000 |
| TNNQSSYPTSDVQKTA | 1697 | 27.923 | 3.549 | 0.000 | 0.000 | 0.130 | 0.479 | 0.009 |
| TNNQSSYPAINTQKTA | 1698 | 27.590 | 5.013 | 0.000 | 0.000 | 0.000 | 0.000 | 0.000 |
| TNAPRSYPAEVVQKTA | 1699 | 27.525 | 2.321 | 0.000 | 0.000 | 0.000 | 0.000 | 0.002 |
| TNNQAHNPAEVVQKTA | 1700 | 27.459 | 2.355 | 0.000 | 0.000 | 0.000 | 0.000 | 0.000 |
| TNNQSARIAEVVQKTA | 1701 | 27.305 | 5.056 | 0.000 | 0.000 | 0.000 | 0.000 | 0.000 |
| TNNQSSIHQEVVQKTA | 1702 | 27.261 | 3.709 | 0.000 | 0.000 | 0.000 | 0.000 | 0.011 |
| TNNQSSYPGPKVQKTA | 1703 | 26.890 | 4.998 | 0.000 | 0.000 | 0.000 | 0.000 | 12.243 |
| TNNQSSYPASQSQKTA | 1704 | 26.085 | 3.225 | 0.000 | 0.000 | 0.001 | 0.000 | 0.000 |
| TNNQSVAKAEVVQKTA | 1705 | 25.379 | 2.456 | 0.004 | 0.000 | 0.000 | 0.000 | 0.000 |
| TGLLSSYPAEVVQKTA | 1706 | 25.248 | 1.073 | 0.000 | 17.422 | 0.000 | 0.000 | 0.866 |
| TNNQSSYPAEMNKKTA | 1707 | 25.179 | 11.154 | 0.000 | 0.000 | 0.000 | 0.000 | 0.000 |
| TNNQSSYPAEVVIRGA | 1708 | 24.885 | 0.454 | 0.000 | 0.000 | 0.000 | 0.000 | 0.000 |
| TNNQSSYVLEVVQKTA | 1709 | 24.760 | 3.119 | 0.000 | 0.000 | 0.000 | 0.000 | 0.000 |
| TNNQSSYPAERSAKTA | 1710 | 24.694 | 4.869 | 0.001 | 0.000 | 0.000 | 0.000 | 0.000 |
| TNNQSSYRTNVVQKTA | 1711 | 24.382 | 0.619 | 0.000 | 0.000 | 0.000 | 0.000 | 0.000 |
| TNFTPSYPAEVVQKTA | 1712 | 24.209 | 0.528 | 0.000 | 1.558 | 0.000 | 0.000 | 0.005 |
| TNNQSSTTTEVVQKTA | 1713 | 24.072 | 0.872 | 0.005 | 0.000 | 0.058 | 0.000 | 0.001 |
| TNNQSFLDAEVVQKTA | 1714 | 24.054 | 0.885 | 0.008 | 0.000 | 0.000 | 0.000 | 0.006 |
| TNNQSSYPTSNVQKTA | 1715 | 23.530 | 3.586 | 0.000 | 0.000 | 0.000 | 0.622 | 0.000 |
| TNNQSSRHDEVVQKTA | 1716 | 23.512 | 1.200 | 0.000 | 0.000 | 0.000 | 0.000 | 0.000 |
| TNNQSSYPQKSVQKTA | 1717 | 23.414 | 2.234 | 0.000 | 0.000 | 0.000 | 0.000 | 0.000 |
| TNNQSSYPAERHPKTA | 1718 | 23.276 | 4.332 | 0.000 | 0.000 | 0.000 | 0.000 | 0.000 |
| TNNQSSKVQEVVQKTA | 1719 | 23.231 | 2.813 | 0.000 | 0.000 | 0.000 | 0.000 | 0.000 |
| LGVQSSYPAEVVQKTA | 1720 | 23.175 | 2.605 | 0.000 | 0.000 | 0.000 | 0.000 | 0.000 |
| TNNQSSYPAEARQKTA | 1721 | 22.889 | 4.006 | 0.000 | 0.000 | 0.000 | 0.000 | 0.000 |
| TNNQSSYPDSRVQKTA | 1722 | 22.614 | 4.720 | 0.000 | 0.000 | 0.000 | 0.000 | 0.000 |
| TNNQSSYPQMDVQKTA | 1723 | 22.445 | 2.469 | 0.000 | 0.000 | 0.000 | 0.000 | 0.000 |
| TNNQSVQGAEVVQKTA | 1724 | 22.409 | 0.161 | 0.000 | 0.000 | 0.000 | 0.000 | 0.000 |
| TNNQSSYSEAVVQKTA | 1725 | 22.354 | 0.911 | 0.000 | 0.000 | 0.000 | 1.593 | 0.000 |
| TNNQSSYTALVSQKTA | 1726 | 22.345 | 8.610 | 0.000 | 0.000 | 0.000 | 0.000 | 0.000 |
| TNNQSSYPAEVRAKTA | 1727 | 22.283 | 5.669 | 0.013 | 0.000 | 0.000 | 0.000 | 0.002 |
| TNNQSSPGTEVVQKTA | 1728 | 22.240 | 5.707 | 0.000 | 0.000 | 0.000 | 0.000 | 0.000 |
| TNNQSMMKAEVVQKTA | 1729 | 22.043 | 2.468 | 0.000 | 0.000 | 0.000 | 0.000 | 0.000 |
| TNNQSSYPADNNQKTA | 1730 | 21.899 | 0.254 | 0.000 | 0.000 | 0.000 | 0.000 | 0.074 |
| TNNQSSQNLEVVQKTA | 1731 | 21.884 | 4.064 | 0.000 | 0.000 | 0.000 | 0.000 | 0.000 |
| TNNKPPYPAEVVQKTA | 1732 | 21.774 | 1.524 | 0.000 | 0.000 | 0.000 | 0.000 | 0.002 |
| TNNQSNTYAEVVQKTA | 1733 | 21.680 | 4.281 | 0.000 | 0.000 | 0.000 | 0.000 | 0.000 |
| TNNQSSYPAERPGKTA | 1734 | 21.642 | 4.857 | 0.000 | 0.000 | 0.015 | 0.000 | 0.002 |
| TNNQSSYPAESVRKTA | 1735 | 21.641 | 5.644 | 0.000 | 0.000 | 0.000 | 0.784 | 0.002 |
| TNNQSSYSVGVVQKTA | 1736 | 21.595 | 2.004 | 0.000 | 0.000 | 0.000 | 0.000 | 0.000 |
| TNNQSSYPLDRVQKTA | 1737 | 21.582 | 4.140 | 0.000 | 0.000 | 0.005 | 0.000 | 0.000 |
| TNNQSQIKAEVVQKTA | 1738 | 21.553 | 5.308 | 0.000 | 0.000 | 0.000 | 0.000 | 0.000 |
| TNNQSSNMVEVVQKTA | 1739 | 21.435 | 2.898 | 0.000 | 0.000 | 0.000 | 0.000 | 0.000 |
| TNNQSSYSSHVVQKTA | 1740 | 21.301 | 2.342 | 0.000 | 0.000 | 0.000 | 0.000 | 0.000 |
| TNNQGSSPAEVVQKTA | 1741 | 21.255 | 2.814 | 0.000 | 0.000 | 0.000 | 0.000 | 0.006 |
| TNNQSSKYSEVVQKTA | 1742 | 21.233 | 2.717 | 0.000 | 0.000 | 0.000 | 0.000 | 0.000 |
| TNNQSSYPAEARAKTA | 1743 | 21.084 | 3.135 | 0.000 | 0.000 | 0.000 | 0.000 | 0.000 |
| TNNQSSYTASLTQKTA | 1744 | 21.040 | 14.386 | 0.000 | 0.000 | 0.000 | 0.000 | 0.000 |
| TNNQSSYPAEGPQKTA | 1745 | 21.024 | 1.251 | 0.000 | 0.000 | 0.000 | 0.000 | 0.000 |
| TNNQSQPKAEVVQKTA | 1746 | 20.892 | 1.972 | 0.000 | 1.841 | 0.000 | 0.000 | 0.000 |
| TNNQSQVIAEVVQKTA | 1747 | 20.571 | 0.344 | 0.000 | 0.000 | 0.000 | 0.000 | 0.007 |
| TNNQSSYPAERPNKTA | 1748 | 20.524 | 5.620 | 0.000 | 0.000 | 0.000 | 0.000 | 0.000 |
| TNNQSWTVAEVVQKTA | 1749 | 20.134 | 3.768 | 0.000 | 0.000 | 0.000 | 0.000 | 0.000 |
| TNNQSRVIAEVVQKTA | 1750 | 20.128 | 2.855 | 0.000 | 0.000 | 0.000 | 0.506 | 0.000 |
| TNNQSSYPAEYERKTA | 1751 | 19.648 | 1.217 | 0.000 | 0.000 | 0.000 | 0.000 | 0.000 |
| TFHKSSYPAEVVQKTA | 1752 | 19.633 | 8.119 | 0.000 | 0.000 | 0.000 | 0.000 | 0.000 |
| TNNQRERPAEVVQKTA | 1753 | 19.581 | 2.717 | 0.000 | 0.000 | 0.000 | 0.000 | 0.022 |
| TNNQSSYPAERQGKTA | 1754 | 19.516 | 6.304 | 0.000 | 0.000 | 0.000 | 0.000 | 0.000 |
| TNNQSSYPAEMTKKTA | 1755 | 19.434 | 2.047 | 0.000 | 0.000 | 0.000 | 0.000 | 0.016 |
| TNNQSWNMAEVVQKTA | 1756 | 19.403 | 5.718 | 0.000 | 0.000 | 0.000 | 0.000 | 0.000 |
| TNNQSSLKDEVVQKTA | 1757 | 19.297 | 1.734 | 0.000 | 0.000 | 0.000 | 0.000 | 0.000 |
| TNNQSSYPAGPSQKTA | 1758 | 18.941 | 3.244 | 0.000 | 0.000 | 0.000 | 0.000 | 0.000 |
| TNNQSSKVNEVVQKTA | 1759 | 18.822 | 1.309 | 0.000 | 0.000 | 0.000 | 0.000 | 0.000 |
| TNNQSSYPMRDVQKTA | 1760 | 18.821 | 3.804 | 0.000 | 0.000 | 0.000 | 0.000 | 0.000 |
| TNNQSSYPALTNQKTA | 1761 | 18.740 | 2.259 | 0.000 | 0.000 | 0.000 | 0.000 | 0.001 |
| TNNQSSNALEVVQKTA | 1762 | 18.623 | 3.784 | 0.000 | 0.000 | 0.000 | 0.000 | 0.000 |
| TNNQSSYPAEVVQKSQ | 1763 | 18.240 | 2.245 | 0.000 | 0.000 | 0.000 | 0.000 | 0.000 |
| TPYKSSYPAEVVQKTA | 1764 | 18.238 | 0.798 | 0.000 | 0.000 | 0.000 | 0.000 | 0.000 |
| TTTPSSYPAEVVQKTA | 1765 | 18.196 | 2.669 | 0.007 | 1.392 | 0.000 | 0.000 | 3.732 |
| TNNQSSYKDAVVQKTA | 1766 | 18.131 | 5.014 | 0.000 | 0.000 | 0.000 | 0.000 | 0.000 |
| TNNQSSYPAEDTRKTA | 1767 | 17.933 | 5.009 | 0.000 | 0.000 | 0.000 | 0.000 | 0.000 |
| TNNQSSYPAERTQKTA | 1768 | 17.912 | 4.907 | 0.000 | 0.000 | 0.003 | 0.000 | 0.000 |
| TNNQSSYPAEHAQKTA | 1769 | 17.800 | 0.929 | 0.000 | 0.000 | 0.000 | 0.000 | 0.011 |
| TNNQSSYPAASPQKTA | 1770 | 17.783 | 2.261 | 0.000 | 0.000 | 0.083 | 0.000 | 0.000 |
| TNNQSSKNREVVQKTA | 1771 | 17.772 | 7.501 | 0.000 | 0.000 | 0.000 | 0.000 | 0.000 |
| TNNQSSYPAEVTTKTA | 1772 | 17.474 | 2.148 | 0.000 | 0.000 | 0.000 | 0.000 | 0.004 |
| TNNQSSYPAEVVSKQA | 1773 | 17.439 | 2.945 | 0.000 | 0.000 | 0.000 | 0.000 | 0.041 |
| TNNQRNQPAEVVQKTA | 1774 | 17.352 | 5.416 | 0.000 | 0.000 | 0.000 | 0.000 | 0.005 |
| TNNQSSYPAEKVSKTA | 1775 | 17.300 | 3.161 | 0.000 | 0.000 | 0.000 | 0.000 | 0.008 |
| TNNQSSYPAEFTKKTA | 1776 | 17.287 | 4.123 | 0.000 | 0.000 | 0.000 | 0.000 | 0.000 |
| TAMDSSYPAEVVQKTA | 1777 | 17.278 | 6.714 | 0.000 | 0.000 | 0.000 | 0.000 | 0.000 |
| YLKQSSYPAEVVQKTA | 1778 | 17.185 | 2.032 | 0.000 | 0.000 | 0.000 | 0.000 | 0.000 |
| TNNQSSYPAEKLTKTA | 1779 | 17.174 | 4.714 | 0.005 | 5.527 | 0.000 | 0.000 | 0.000 |
| TNNQSSYPAEVVNGKA | 1780 | 17.143 | 1.029 | 0.000 | 0.000 | 0.000 | 0.000 | 0.000 |
| TNNQSSYPAEKGSKTA | 1781 | 17.038 | 5.983 | 0.000 | 0.000 | 0.000 | 0.000 | 0.000 |
| TNNQSSYPAHINQKTA | 1782 | 16.961 | 7.399 | 0.000 | 0.000 | 0.000 | 0.000 | 0.000 |
| TNNQSSYPVQNVQKTA | 1783 | 16.911 | 3.355 | 0.000 | 0.000 | 0.000 | 0.000 | 0.000 |
| TNNQSSYPKDTVQKTA | 1784 | 16.890 | 1.297 | 0.000 | 0.000 | 0.000 | 0.000 | 0.000 |
| TNNQVIWPAEVVQKTA | 1785 | 16.816 | 2.555 | 0.000 | 0.000 | 0.000 | 0.000 | 0.000 |
| TNNQSWVAAEVVQKTA | 1786 | 16.775 | 0.627 | 0.000 | 0.000 | 0.000 | 0.000 | 0.000 |
| TDGISSYPAEVVQKTA | 1787 | 16.708 | 0.150 | 0.000 | 0.000 | 0.000 | 0.000 | 0.000 |
| TNNQSSRNGEVVQKTA | 1788 | 16.667 | 0.367 | 0.000 | 0.000 | 0.000 | 0.000 | 0.000 |
| TNNQSSHPAEVVQKTA | 1789 | 16.653 | 3.700 | 6.125 | 0.000 | 0.006 | 0.000 | 0.897 |
| TNNQSSMQMEVVQKTA | 1790 | 16.616 | 6.837 | 0.000 | 0.000 | 0.000 | 0.000 | 0.000 |
| TNNQSSVSHEVVQKTA | 1791 | 16.522 | 4.597 | 0.000 | 0.000 | 0.000 | 12.027 | 0.004 |
| TNNQSSTFTEVVQKTA | 1792 | 16.482 | 2.661 | 0.000 | 0.000 | 0.000 | 0.000 | 0.000 |
| TNNQSSYTATASQKTA | 1793 | 16.475 | 5.560 | 0.000 | 0.000 | 0.000 | 0.000 | 0.000 |
| TNNQSSYPAESPKKTA | 1794 | 16.426 | 3.157 | 0.023 | 0.000 | 0.000 | 0.000 | 0.000 |
| TNNQSSYPAEPRGKTA | 1795 | 16.249 | 6.345 | 0.000 | 0.000 | 0.000 | 0.000 | 0.000 |
| TNNQSSIRLEVVQKTA | 1796 | 16.197 | 3.887 | 0.000 | 0.000 | 0.000 | 0.000 | 0.000 |
| TNNQSSYPAKDLQKTA | 1797 | 16.197 | 0.255 | 0.000 | 0.000 | 0.000 | 0.000 | 0.000 |
| TNNQSSYPAEHVSKTA | 1798 | 16.196 | 5.228 | 0.000 | 0.000 | 0.000 | 0.000 | 0.032 |
| TNNQSSYPAEGKAKTA | 1799 | 16.075 | 3.013 | 0.000 | 0.000 | 0.000 | 0.000 | 0.026 |
| TNNQSRMKAEVVQKTA | 1800 | 15.914 | 1.084 | 0.000 | 0.000 | 1.069 | 0.000 | 0.000 |
| TNNQSWLQAEVVQKTA | 1801 | 15.911 | 3.287 | 0.000 | 0.000 | 0.009 | 0.000 | 0.000 |
| TNNQSHDRAEVVQKTA | 1802 | 15.847 | 3.669 | 0.000 | 0.000 | 0.000 | 0.000 | 0.000 |
| TNNQSSGSTEVVQKTA | 1803 | 15.778 | 5.237 | 0.000 | 0.000 | 0.000 | 0.000 | 0.000 |
| TNNQSSYPAEPAKKTA | 1804 | 15.763 | 3.448 | 0.000 | 0.000 | 0.000 | 0.000 | 0.005 |
| TNNQSSYPAERSNKTA | 1805 | 15.735 | 3.609 | 0.000 | 0.000 | 0.000 | 0.000 | 0.000 |
| TFNKSSYPAEVVQKTA | 1806 | 15.700 | 0.476 | 0.000 | 0.000 | 0.000 | 0.000 | 0.000 |
| TNNQSCLYAEVVQKTA | 1807 | 15.679 | 2.156 | 0.000 | 0.000 | 0.000 | 0.000 | 0.000 |
| TNNQSSYPAERVLKTA | 1808 | 15.674 | 3.436 | 0.000 | 0.000 | 0.000 | 0.000 | 0.000 |
| TFRRSSYPAEVVQKTA | 1809 | 15.621 | 10.989 | 0.000 | 0.000 | 0.000 | 0.000 | 0.000 |
| TNNRHNYPAEVVQKTA | 1810 | 15.620 | 1.758 | 0.000 | 0.000 | 0.000 | 0.000 | 0.000 |
| TNNQSSYPAETEGKTA | 1811 | 15.607 | 1.076 | 0.000 | 0.000 | 0.000 | 0.000 | 0.000 |
| TNHPSSYPAEVVQKTA | 1812 | 15.593 | 1.681 | 0.000 | 0.000 | 0.000 | 0.000 | 0.002 |
| TTGISSYPAEVVQKTA | 1813 | 15.532 | 1.301 | 0.000 | 0.000 | 0.000 | 0.000 | 0.000 |
| TNAAQSYPAEVVQKTA | 1814 | 15.531 | 1.512 | 0.000 | 0.000 | 0.000 | 0.000 | 0.000 |
| TNNQSSGSMEVVQKTA | 1815 | 15.459 | 5.283 | 0.000 | 0.000 | 0.000 | 0.000 | 0.000 |
| TNNARGYPAEVVQKTA | 1816 | 15.450 | 4.233 | 0.000 | 0.000 | 0.000 | 0.000 | 0.000 |
| TNNQSSYPFRSVQKTA | 1817 | 15.429 | 0.000 | 0.000 | 0.000 | 0.000 | 0.000 | 0.000 |
| TNLTGSYPAEVVQKTA | 1818 | 15.427 | 1.420 | 0.000 | 0.000 | 0.000 | 0.000 | 0.001 |
| TNNQSSTYLEVVQKTA | 1819 | 15.377 | 2.983 | 0.004 | 0.000 | 0.000 | 0.000 | 0.000 |
| TNNQSSYPPAQVQKTA | 1820 | 15.332 | 3.214 | 0.000 | 0.000 | 0.005 | 0.000 | 0.000 |
| THYGSSYPAEVVQKTA | 1821 | 15.294 | 0.251 | 0.000 | 0.000 | 0.000 | 0.000 | 0.000 |
| TNNQSRFGAEVVQKTA | 1822 | 15.279 | 2.490 | 0.000 | 0.000 | 0.000 | 0.000 | 0.000 |
| TNNVKHYPAEVVQKTA | 1823 | 15.239 | 0.208 | 0.000 | 0.000 | 0.000 | 0.000 | 0.000 |
| TNNQSSYPTKSVQKTA | 1824 | 15.221 | 3.402 | 0.010 | 0.000 | 0.000 | 0.000 | 0.047 |
| TNNQSSYSQHVVQKTA | 1825 | 15.207 | 2.302 | 0.000 | 0.000 | 0.000 | 0.000 | 0.003 |
| TNNQSSGHTEVVQKTA | 1826 | 15.202 | 7.933 | 0.000 | 0.000 | 0.000 | 0.000 | 0.005 |
| TNNQSSYPAQTVQKTA | 1827 | 15.159 | 3.586 | 0.000 | 0.000 | 0.077 | 0.000 | 0.002 |
| TNNQSSYPAHFPQKTA | 1828 | 15.145 | 1.610 | 0.000 | 0.000 | 0.000 | 0.000 | 0.000 |
| TNNQSSYPLAKVQKTA | 1829 | 15.138 | 3.309 | 0.000 | 0.000 | 0.000 | 0.000 | 0.000 |
| TNNQSSYTALTVQKTA | 1830 | 15.057 | 10.012 | 0.000 | 0.000 | 0.000 | 0.000 | 0.000 |
| TNQRSSYPAEVVQKTA | 1831 | 15.029 | 3.694 | 0.000 | 0.000 | 0.000 | 0.000 | 1.493 |
| TNNQSSYPAEVVSKKA | 1832 | 14.986 | 1.378 | 0.000 | 0.000 | 0.000 | 0.000 | 0.003 |
| TNNQSSYPASRSQKTA | 1833 | 14.966 | 1.741 | 0.000 | 0.000 | 0.000 | 0.000 | 0.005 |
| TNNQSDIRAEVVQKTA | 1834 | 14.861 | 9.186 | 0.000 | 0.000 | 0.000 | 0.000 | 0.005 |
| TNNQYSRPAEVVQKTA | 1835 | 14.818 | 6.222 | 0.000 | 0.000 | 0.000 | 0.000 | 0.672 |
| TNNQSGLNAEVVQKTA | 1836 | 14.713 | 4.785 | 0.005 | 0.000 | 0.000 | 0.000 | 0.000 |
| TNNQSRMMAEVVQKTA | 1837 | 14.700 | 4.917 | 0.000 | 0.000 | 113.3 | 0.387 | 0.000 |
| TSAKSSYPAEVVQKTA | 1838 | 14.673 | 1.418 | 0.000 | 0.000 | 0.000 | 0.000 | 0.009 |
| TNNQSSYPANGPQKTA | 1839 | 14.649 | 2.642 | 0.000 | 0.000 | 0.000 | 0.000 | 0.000 |
| VFYQSSYPAEVVQKTA | 1840 | 14.578 | 0.183 | 0.000 | 0.000 | 0.000 | 0.000 | 0.000 |
| TNNQSSYPAERTSKTA | 1841 | 14.574 | 3.973 | 0.000 | 0.000 | 0.002 | 0.000 | 0.000 |
| TNSTPSYPAEVVQKTA | 1842 | 14.527 | 2.179 | 0.072 | 0.000 | 0.000 | 0.000 | 1.229 |
| TNNQSSYPAEHAVKTA | 1843 | 14.486 | 2.272 | 0.000 | 0.000 | 0.000 | 0.000 | 0.000 |
| TNNQSRGHAEVVQKTA | 1844 | 14.451 | 3.993 | 0.000 | 0.000 | 0.000 | 0.185 | 0.000 |
| TNNRAGYPAEVVQKTA | 1845 | 14.424 | 4.286 | 0.000 | 0.000 | 0.000 | 0.000 | 0.000 |
| TNNQSSYPAEQRLKTA | 1846 | 14.420 | 6.535 | 0.000 | 0.000 | 0.002 | 0.000 | 0.000 |
| TNNQSRIMAEVVQKTA | 1847 | 14.362 | 4.485 | 0.000 | 0.000 | 0.086 | 0.000 | 0.000 |
| TNNQSTTLAEVVQKTA | 1848 | 14.334 | 4.654 | 0.000 | 0.000 | 0.004 | 0.109 | 0.004 |
| TNNQSSYPAEVANKTA | 1849 | 14.333 | 5.878 | 0.000 | 0.000 | 0.000 | 0.000 | 0.004 |
| TNNQSSSVKEVVQKTA | 1850 | 14.316 | 3.803 | 0.019 | 0.000 | 0.000 | 0.000 | 0.000 |
| TNNQSSYTTSLVQKTA | 1851 | 14.263 | 9.339 | 0.000 | 0.000 | 0.000 | 0.000 | 0.053 |
| TNNQSSYPAHNMQKTA | 1852 | 14.168 | 2.792 | 0.000 | 0.000 | 0.000 | 0.000 | 0.000 |
| TNNQSSYPAQTTQKTA | 1853 | 14.112 | 3.444 | 0.000 | 0.000 | 0.000 | 0.000 | 0.003 |
| TNNQSSYPFNSVQKTA | 1854 | 14.027 | 1.747 | 0.001 | 0.000 | 0.000 | 0.000 | 0.002 |
| TNNQSIIRAEVVQKTA | 1855 | 13.962 | 3.872 | 0.000 | 0.000 | 0.000 | 0.000 | 0.000 |
| TNNQSLRIAEVVQKTA | 1856 | 13.958 | 2.105 | 0.001 | 0.000 | 0.000 | 0.000 | 0.000 |
| TNNQSCCLAEVVQKTA | 1857 | 13.938 | 3.967 | 0.000 | 0.000 | 0.000 | 1.090 | 0.000 |
| TNNQSSALLEVVQKTA | 1858 | 13.926 | 4.607 | 0.017 | 0.000 | 0.000 | 0.000 | 0.001 |
| TNNQSSYPAEVVQRNT | 1859 | 13.901 | 0.859 | 0.000 | 0.000 | 0.000 | 0.000 | 0.000 |
| TNNQLNLPAEVVQKTA | 1860 | 13.886 | 1.557 | 0.000 | 0.000 | 0.000 | 0.000 | 0.003 |
| TNNQSRMYAEVVQKTA | 1861 | 13.872 | 4.626 | 0.000 | 0.000 | 0.000 | 0.000 | 0.000 |
| TNNQSSYPAEVVLDMA | 1862 | 13.847 | 0.023 | 0.000 | 0.000 | 0.000 | 0.000 | 0.000 |
| TNNQSKVMAEVVQKTA | 1863 | 13.836 | 4.270 | 0.000 | 0.000 | 0.006 | 0.000 | 0.000 |
| TNNQSSVRQEVVQKTA | 1864 | 13.782 | 5.311 | 0.032 | 0.000 | 0.005 | 224130.7 | 0.001 |
| TNNQSSYVSKVVQKTA | 1865 | 13.778 | 5.007 | 0.000 | 0.000 | 0.000 | 1.049 | 0.000 |
| TNNQSSYPAETHVKTA | 1866 | 13.750 | 4.737 | 0.000 | 0.000 | 0.000 | 0.000 | 0.000 |
| TNNQSSHGIEVVQKTA | 1867 | 13.712 | 4.717 | 0.000 | 0.000 | 0.000 | 0.000 | 0.000 |
| THSQSSYPAEVVQKTA | 1868 | 13.670 | 1.734 | 0.001 | 0.000 | 0.000 | 0.000 | 2.202 |
| TNNQSSYPGNAVQKTA | 1869 | 13.658 | 3.408 | 0.000 | 0.000 | 0.000 | 0.000 | 0.001 |
| TNNQSSMNLEVVQKTA | 1870 | 13.627 | 3.094 | 0.000 | 0.000 | 0.000 | 0.000 | 0.001 |
| TNNQSSYTARVVQKTA | 1871 | 13.624 | 1.418 | 0.039 | 0.000 | 0.000 | 0.000 | 0.000 |
| TNNQSQGAAEVVQKTA | 1872 | 13.582 | 4.669 | 0.000 | 0.000 | 0.000 | 0.000 | 0.009 |
| TNNQSSYPAERGAKTA | 1873 | 13.571 | 4.712 | 0.000 | 0.000 | 0.000 | 0.000 | 0.000 |
| TNNQSSPILEVVQKTA | 1874 | 13.557 | 6.002 | 0.000 | 0.000 | 0.000 | 0.000 | 0.005 |
| TNNQSSYPAETHSKTA | 1875 | 13.530 | 6.586 | 0.000 | 0.000 | 0.000 | 0.000 | 0.000 |
| TAFRSSYPAEVVQKTA | 1876 | 13.525 | 2.361 | 0.000 | 0.000 | 0.000 | 0.000 | 0.000 |
| TNNVRSYPAEVVQKTA | 1877 | 13.465 | 3.993 | 0.000 | 0.000 | 0.003 | 0.000 | 0.010 |
| TNNQSATPAEVVQKTA | 1878 | 13.413 | 2.222 | 0.000 | 0.270 | 0.000 | 0.000 | 0.003 |
| TNNQSLTYAEVVQKTA | 1879 | 13.296 | 1.688 | 0.000 | 0.000 | 0.000 | 0.000 | 0.000 |
| TNNQKRGPAEVVQKTA | 1880 | 13.274 | 5.012 | 0.000 | 0.000 | 0.000 | 0.000 | 0.000 |
| TNNQSSYPMPAVQKTA | 1881 | 13.125 | 3.693 | 0.000 | 0.000 | 0.000 | 0.000 | 0.001 |
| TNNQSRNPAEVVQKTA | 1882 | 13.084 | 2.666 | 0.019 | 0.000 | 0.000 | 0.222 | 0.004 |
| TNNQSNVRAEVVQKTA | 1883 | 13.033 | 4.034 | 0.000 | 0.000 | 0.000 | 0.000 | 0.005 |
| TNNQSKLLAEVVQKTA | 1884 | 13.004 | 3.829 | 0.000 | 0.000 | 0.000 | 0.000 | 0.000 |
| TNNQSYMIAEVVQKTA | 1885 | 12.960 | 2.494 | 0.000 | 0.000 | 0.000 | 0.000 | 0.000 |
| TNNQSSYPEPKVQKTA | 1886 | 12.959 | 5.548 | 0.000 | 0.000 | 0.000 | 0.646 | 0.000 |
| TNNQSSYPAESMLKTA | 1887 | 12.928 | 2.621 | 0.000 | 0.000 | 0.002 | 0.144 | 0.001 |
| TNNQSSYPAEILRKTA | 1888 | 12.921 | 5.048 | 0.000 | 0.000 | 0.000 | 0.000 | 0.001 |
| TNNQSFMVAEVVQKTA | 1889 | 12.921 | 1.794 | 0.000 | 0.000 | 0.000 | 0.000 | 0.000 |
| TNNQSSYPAEKLVKTA | 1890 | 12.911 | 4.402 | 0.005 | 0.000 | 0.000 | 0.168 | 0.004 |
| TNNQSSYPAHSGQKTA | 1891 | 12.828 | 3.582 | 0.000 | 0.000 | 0.000 | 0.000 | 0.000 |
| TNNQSSYPAENRGKTA | 1892 | 12.790 | 4.245 | 0.000 | 0.000 | 0.023 | 0.000 | 0.003 |
| TNNQSHLFAEVVQKTA | 1893 | 12.741 | 2.798 | 0.000 | 0.000 | 0.000 | 0.000 | 0.000 |
| TNNQSMTYAEVVQKTA | 1894 | 12.738 | 0.925 | 0.000 | 0.000 | 0.000 | 0.000 | 0.000 |
| TNNQSGRQAEVVQKTA | 1895 | 12.598 | 2.184 | 0.000 | 0.000 | 0.000 | 0.000 | 2.796 |
| IAPQSSYPAEVVQKTA | 1896 | 12.595 | 0.000 | 0.000 | 0.000 | 0.000 | 0.000 | 0.000 |
| TNNQSSYPAEKTGKTA | 1897 | 12.539 | 4.257 | 0.000 | 0.000 | 0.000 | 0.000 | 0.000 |
| TNNQSWALAEVVQKTA | 1898 | 12.529 | 1.420 | 0.000 | 0.000 | 0.000 | 0.000 | 0.000 |
| TNNQSSAPLEVVQKTA | 1899 | 12.517 | 3.246 | 0.000 | 0.000 | 0.000 | 0.000 | 0.000 |
| TNNQSFVKAEVVQKTA | 1900 | 12.515 | 5.062 | 0.078 | 0.000 | 0.005 | 0.000 | 0.000 |
| TNNQSSYPAEVGKKTA | 1901 | 12.494 | 2.992 | 0.000 | 0.000 | 0.000 | 0.000 | 0.000 |
| TNNQSSYPAEVRKLTA | 1902 | 12.486 | 3.952 | 0.000 | 0.000 | 0.000 | 0.000 | 0.000 |
| TNNQYQSPAEVVQKTA | 1903 | 12.288 | 2.134 | 0.000 | 0.000 | 0.000 | 0.000 | 0.000 |
| TNNQSSYPAERQNKTA | 1904 | 12.283 | 7.027 | 0.008 | 0.000 | 0.000 | 0.000 | 0.000 |
| TNNQSSYTAESMLKTA | 1905 | 12.250 | 0.891 | 0.000 | 0.000 | 0.000 | 0.000 | 0.000 |
| TNLTSSYPAEVVQKTA | 1906 | 12.093 | 3.006 | 0.000 | 0.000 | 0.000 | 0.000 | 1.818 |
| TNNQSTVKAEVVQKTA | 1907 | 12.085 | 3.357 | 0.009 | 0.000 | 0.000 | 0.000 | 0.000 |
| TNNQSSPHTEVVQKTA | 1908 | 11.974 | 1.811 | 0.000 | 0.000 | 0.000 | 0.000 | 0.000 |
| TNNQSSYPAVVMQKTA | 1909 | 11.964 | 1.683 | 0.000 | 0.000 | 0.000 | 0.000 | 0.000 |
| TNNQSSPGREVVQKTA | 1910 | 11.961 | 1.945 | 0.000 | 0.000 | 0.000 | 0.000 | 0.000 |
| TIQTSSYPAEVVQKTA | 1911 | 11.943 | 1.273 | 0.055 | 0.000 | 0.033 | 0.000 | 0.000 |
| TNNQSSYPSHDVQKTA | 1912 | 11.932 | 2.338 | 0.000 | 0.000 | 0.000 | 0.000 | 0.000 |
| TNNQSSTIFEVVQKTA | 1913 | 11.924 | 0.277 | 0.000 | 0.000 | 0.000 | 0.000 | 0.000 |
| TNNQSGKRAEVVQKTA | 1914 | 11.869 | 1.710 | 0.000 | 0.000 | 0.000 | 0.000 | 0.000 |
| TNNQSSYPAEVSAKTA | 1915 | 11.755 | 2.942 | 3.684 | 0.000 | 0.000 | 0.000 | 0.549 |
| TNNQSTAPAEVVQKTA | 1916 | 11.701 | 2.848 | 0.020 | 0.000 | 0.000 | 0.000 | 1.552 |
| TNNQSVRNAEVVQKTA | 1917 | 11.700 | 5.299 | 0.004 | 0.000 | 0.000 | 0.000 | 0.000 |
| TNNQSSYPAVNVQKTA | 1918 | 11.683 | 2.855 | 0.000 | 0.000 | 0.003 | 0.624 | 0.000 |
| TNNQSVFRAEVVQKTA | 1919 | 11.636 | 3.423 | 0.000 | 0.000 | 0.010 | 0.000 | 0.000 |
| TNNQSSYPARDLQKTA | 1920 | 11.635 | 2.649 | 0.000 | 0.000 | 0.000 | 0.000 | 0.000 |
| TNNRVTYPAEVVQKTA | 1921 | 11.604 | 4.162 | 0.000 | 0.000 | 0.000 | 0.000 | 0.000 |
| TNNQSSYPAGASQKTA | 1922 | 11.587 | 2.692 | 0.000 | 0.000 | 0.000 | 0.000 | 0.001 |
| TNNQRLTPAEVVQKTA | 1923 | 11.563 | 0.939 | 0.000 | 0.000 | 0.000 | 0.000 | 0.000 |
| TNNQSKMFAEVVQKTA | 1924 | 11.548 | 5.878 | 0.004 | 0.000 | 0.000 | 0.000 | 0.000 |
| TNNQSSYTTMVVQKTA | 1925 | 11.545 | 2.022 | 0.000 | 0.000 | 0.000 | 0.000 | 0.001 |
| TNNQHSPPAEVVQKTA | 1926 | 11.524 | 1.602 | 0.090 | 0.000 | 0.000 | 0.000 | 0.001 |
| TNNQSSYPADHQQKTA | 1927 | 11.518 | 2.922 | 0.000 | 0.000 | 0.000 | 0.000 | 0.000 |
| TNNQSSYPAEVVKNHA | 1928 | 11.518 | 2.302 | 0.000 | 0.000 | 0.000 | 0.000 | 0.000 |
| TNNQSKGIAEVVQKTA | 1929 | 11.494 | 2.897 | 0.000 | 0.000 | 0.000 | 0.000 | 0.000 |
| TNNPFVYPAEVVQKTA | 1930 | 11.477 | 0.766 | 0.000 | 0.000 | 0.000 | 0.000 | 0.000 |
| TNNQSSYPAEVNQRTA | 1931 | 11.467 | 5.421 | 0.000 | 0.000 | 0.000 | 0.000 | 0.017 |
| TNNQSQARAEVVQKTA | 1932 | 11.462 | 3.052 | 0.000 | 1.765 | 0.000 | 0.000 | 0.000 |
| TNAMRSYPAEVVQKTA | 1933 | 11.435 | 0.717 | 0.297 | 0.000 | 0.000 | 0.000 | 0.008 |
| TNNQSSYPAEMRTKTA | 1934 | 11.414 | 6.798 | 0.000 | 0.000 | 0.000 | 0.000 | 0.000 |
| TNNQSSYPMGTVQKTA | 1935 | 11.385 | 1.645 | 0.000 | 0.000 | 0.000 | 0.000 | 0.000 |
| TNNQSKLLAEVVQKPA | 1936 | 11.342 | 2.915 | 0.000 | 0.000 | 0.000 | 0.000 | 0.000 |
| TNNGHSYPAEVVQKTA | 1937 | 11.323 | 1.066 | 0.000 | 0.000 | 0.123 | 0.000 | 0.006 |
| TNNQSSYPAEKASKTA | 1938 | 11.283 | 3.164 | 0.000 | 0.000 | 0.005 | 0.000 | 0.000 |
| TNNQSYLPAEVVQKTA | 1939 | 11.281 | 3.598 | 0.000 | 0.000 | 0.000 | 0.000 | 0.000 |
| TNNQSSYPATASQKTA | 1940 | 11.239 | 4.205 | 0.000 | 0.000 | 0.006 | 0.104 | 0.000 |
| TNNQSSYPAEVGKSTA | 1941 | 11.236 | 5.856 | 0.000 | 0.000 | 0.000 | 0.000 | 0.000 |
| TNNQSSFNVEVVQKTA | 1942 | 11.231 | 1.252 | 0.000 | 0.000 | 0.000 | 0.000 | 0.008 |
| TNNQSSRYQEVVQKTA | 1943 | 11.191 | 2.650 | 0.000 | 0.000 | 0.000 | 0.000 | 0.000 |
| TNNQQDLPAEVVQKTA | 1944 | 11.184 | 0.000 | 0.000 | 0.000 | 0.000 | 0.000 | 0.000 |
| TTSQSSYPAEVVQKTA | 1945 | 11.183 | 1.308 | 0.000 | 2.070 | 0.000 | 0.000 | 0.000 |
| TNNQSMGLAEVVQKTA | 1946 | 11.182 | 3.666 | 0.000 | 0.000 | 0.000 | 0.000 | 1.522 |
| TNNQSSILAEVVQKTA | 1947 | 11.168 | 4.373 | 0.011 | 0.000 | 0.000 | 0.000 | 0.003 |
| TNNQSSYPARESQKTA | 1948 | 11.167 | 5.693 | 0.000 | 0.000 | 0.000 | 0.000 | 0.002 |
| TFFKSSYPAEVVQKTA | 1949 | 11.161 | 6.543 | 0.000 | 0.000 | 0.000 | 0.000 | 0.000 |
| TNNQSYLQAEVVQKTA | 1950 | 11.149 | 5.709 | 0.000 | 0.000 | 0.000 | 0.000 | 0.000 |
| TNNQSSYPLKSVQKTA | 1951 | 11.144 | 2.721 | 0.000 | 3.887 | 1.099 | 0.000 | 0.000 |
| TNNQVSNPAEVVQKPA | 1952 | 11.144 | 0.756 | 0.000 | 0.000 | 0.000 | 0.000 | 0.000 |
| TNNQSSYPASSVKKTA | 1953 | 11.121 | 2.694 | 0.000 | 0.000 | 0.000 | 0.000 | 0.000 |
| SRSQSSYPAEVVQKTA | 1954 | 11.116 | 3.092 | 0.000 | 0.000 | 0.000 | 0.000 | 0.000 |
| TNNQSSYPATANQKTA | 1955 | 11.110 | 1.662 | 0.006 | 0.000 | 0.000 | 0.000 | 0.008 |
| TNNQRVSPAEVVQKTA | 1956 | 11.107 | 2.954 | 0.000 | 0.491 | 0.000 | 0.000 | 0.006 |
| TNNQSWTLAEVVQKTA | 1957 | 11.074 | 5.721 | 0.000 | 0.000 | 0.000 | 0.000 | 0.000 |
| TNNQSSTSQEVVQKTA | 1958 | 11.070 | 5.925 | 0.000 | 0.000 | 0.000 | 0.000 | 0.004 |
| TNNQSSTWSEVVQKTA | 1959 | 11.024 | 4.711 | 0.104 | 0.000 | 0.000 | 0.000 | 1.778 |
| TNNQSFRLAEVVQKTA | 1960 | 11.023 | 3.075 | 0.000 | 0.000 | 0.000 | 0.000 | 0.000 |
| TNNQSSYQREVVQKTA | 1961 | 11.009 | 1.955 | 0.000 | 0.000 | 0.000 | 0.000 | 0.006 |
| TNNQSSYPAEMTRKTA | 1962 | 11.004 | 2.855 | 0.000 | 0.000 | 0.000 | 0.000 | 0.000 |
| TNNQSSYPVHNVQKTA | 1963 | 10.987 | 2.473 | 0.000 | 0.000 | 0.000 | 0.000 | 0.000 |
| TNNQSSLHREVVQKTA | 1964 | 10.972 | 2.605 | 0.000 | 0.000 | 0.000 | 0.000 | 0.000 |
| TNNQSSFTREVVQKTA | 1965 | 10.958 | 2.447 | 0.000 | 0.000 | 0.000 | 0.000 | 0.000 |
| TNNQSSRVNEVVQKTA | 1966 | 10.934 | 2.861 | 0.000 | 0.000 | 0.000 | 0.000 | 0.000 |
| TNNQSSYPRGTVQKTA | 1967 | 10.909 | 2.381 | 0.000 | 0.000 | 0.499 | 1.353 | 0.021 |
| TPRPSSYPAEVVQKTA | 1968 | 10.907 | 2.676 | 0.000 | 14.902 | 0.000 | 0.000 | 0.011 |
| TNNQSRTYAEVVQKTA | 1969 | 10.896 | 3.655 | 0.000 | 0.000 | 0.000 | 0.000 | 0.000 |
| TNNQSSYTALVTQKTA | 1970 | 10.889 | 7.450 | 0.000 | 0.000 | 0.000 | 0.000 | 0.000 |
| TNNQSFNLAEVVQKTA | 1971 | 10.863 | 5.748 | 0.036 | 0.000 | 0.000 | 0.000 | 0.002 |
| TNWQSSYPAEVVQKTA | 1972 | 10.804 | 3.863 | 0.000 | 0.000 | 0.000 | 0.000 | 0.000 |
| TLQTSSYPAEVVQKTA | 1973 | 10.800 | 3.298 | 0.012 | 77.694 | 374.6 | 0.000 | 0.000 |
| TNNQSSYPAERLQKTA | 1974 | 10.798 | 4.850 | 0.000 | 0.000 | 0.000 | 0.000 | 0.000 |
| TNNQSSMLPEVVQKTA | 1975 | 10.792 | 3.735 | 0.001 | 0.000 | 0.000 | 0.000 | 0.001 |
| TNNQSSYPESGVQKTA | 1976 | 10.772 | 2.301 | 0.000 | 0.000 | 0.000 | 0.000 | 0.000 |
| TNNQSSYPSTNVQKTA | 1977 | 10.723 | 3.581 | 0.000 | 0.000 | 0.000 | 0.000 | 0.005 |
| TNNQSSYPFSQVQKTA | 1978 | 10.655 | 4.068 | 0.000 | 0.000 | 0.000 | 0.000 | 0.000 |
| TNNQSGQLAEVVQKTA | 1979 | 10.620 | 2.718 | 0.000 | 0.000 | 0.000 | 0.000 | 0.003 |
| TNNQSSRWQEVVQKTA | 1980 | 10.619 | 0.039 | 0.000 | 0.000 | 0.000 | 0.000 | 0.000 |
| TNNQSSSPAEVVQKPA | 1981 | 10.609 | 4.216 | 0.000 | 0.000 | 0.000 | 0.000 | 0.299 |
| TNNQSSIALEVVQKTA | 1982 | 10.601 | 4.298 | 0.000 | 0.000 | 0.000 | 0.000 | 0.000 |
| TNNQSSARSEVVQKTA | 1983 | 10.585 | 4.080 | 0.009 | 0.000 | 0.000 | 0.000 | 0.003 |
| TNNQSSSVREVVQKTA | 1984 | 10.563 | 2.732 | 0.000 | 0.000 | 0.000 | 0.000 | 0.000 |
| TNNQSMSHAEVVQKTA | 1985 | 10.559 | 2.887 | 0.000 | 0.000 | 0.000 | 0.000 | 0.000 |
| TNNQSSKTQEVVQKTA | 1986 | 10.559 | 1.692 | 0.000 | 1.914 | 0.000 | 0.000 | 0.002 |
| TNNQSSIGTEVVQKTA | 1987 | 10.505 | 2.615 | 0.000 | 0.000 | 0.000 | 0.000 | 0.009 |
| TNNQSSYPASAMQKTA | 1988 | 10.505 | 3.785 | 0.001 | 0.000 | 0.000 | 0.000 | 0.000 |
| TNNQSSYPAQHTQKTA | 1989 | 10.502 | 3.440 | 0.000 | 0.000 | 0.000 | 0.000 | 0.000 |
| TNNQSSYPPKQVQKTA | 1990 | 10.501 | 1.690 | 0.000 | 0.000 | 0.000 | 0.000 | 0.006 |
| TNSKNSYPAEVVQKTA | 1991 | 10.499 | 2.291 | 0.033 | 0.000 | 0.000 | 0.000 | 0.000 |
| TNNQRSMPAEVVQKTA | 1992 | 10.485 | 3.812 | 0.050 | 0.000 | 0.000 | 0.000 | 0.000 |
| TNNQSSSNLEVVQKTA | 1993 | 10.475 | 3.045 | 0.000 | 0.000 | 0.000 | 0.000 | 0.000 |
| TNNQVLYPAEVVQKTA | 1994 | 10.467 | 2.334 | 0.005 | 0.000 | 0.016 | 0.000 | 0.001 |
| TNNQSIHPAEVVQKTA | 1995 | 10.463 | 2.236 | 0.000 | 0.000 | 0.000 | 0.248 | 0.003 |
| TNNQSYNMAEVVQKTA | 1996 | 10.429 | 5.146 | 0.000 | 0.000 | 0.000 | 0.000 | 0.000 |
| TNNQSSYTASSAQKTA | 1997 | 10.427 | 3.158 | 0.000 | 0.000 | 0.000 | 0.000 | 0.000 |
| TNNQSSNGVEVVQKTA | 1998 | 10.415 | 2.651 | 0.000 | 0.000 | 0.000 | 0.000 | 0.000 |
| TNNQSSYPDRLVQKTA | 1999 | 10.409 | 2.906 | 0.001 | 0.000 | 0.000 | 0.000 | 0.000 |
| TNNQSSLLAEVVQKTA | 2000 | 10.367 | 3.838 | 0.000 | 23.928 | 0.011 | 2.016 | 0.090 |
| TNNQSPTAAEVVQKTA | 2001 | 10.307 | 1.949 | 0.000 | 0.000 | 0.000 | 0.000 | 0.001 |
| TNNQSSQLAEVVQKTA | 2002 | 10.294 | 3.792 | 0.008 | 0.000 | 0.005 | 0.000 | 0.000 |
| TNNQSSYPTTEVQKTA | 2003 | 10.277 | 5.539 | 0.000 | 0.000 | 0.000 | 0.000 | 0.004 |
| TNNQSSYPAEASQKTA | 2004 | 10.233 | 3.979 | 0.007 | 0.000 | 0.000 | 0.000 | 0.000 |
| TNNQSWVLAEVVQKTA | 2005 | 10.223 | 2.827 | 0.000 | 0.000 | 0.000 | 0.000 | 0.000 |
| TNNQSSIVREVVQKTA | 2006 | 10.214 | 4.402 | 0.000 | 0.000 | 0.000 | 0.178 | 0.002 |
| TNNQWTRPAEVVQKTA | 2007 | 10.195 | 1.655 | 0.000 | 0.000 | 0.000 | 0.000 | 0.000 |
| TNNQSSYERVVVQKTA | 2008 | 10.189 | 0.652 | 0.000 | 0.000 | 0.000 | 0.000 | 0.000 |
| TNNQSSVRSEVVQKTA | 2009 | 10.180 | 3.489 | 0.001 | 0.000 | 0.000 | 0.000 | 0.000 |
| TNNQSSELREVVQKTA | 2010 | 10.174 | 2.995 | 0.000 | 0.000 | 0.015 | 0.000 | 0.000 |
| TNNQSSYVKSVVQKTA | 2011 | 10.171 | 2.873 | 0.000 | 0.000 | 0.000 | 0.000 | 0.000 |
| TNNQSSYPKLQVQKTA | 2012 | 10.161 | 3.023 | 0.000 | 0.000 | 0.000 | 0.000 | 0.000 |
| TNNQSSYDVMVVQKTA | 2013 | 10.132 | 6.923 | 0.000 | 0.000 | 0.000 | 0.000 | 0.000 |
| TNSNVSYPAEVVQKTA | 2014 | 10.114 | 2.151 | 0.000 | 0.000 | 0.008 | 0.000 | 0.000 |
| TNNQWSMPAEVVQKTA | 2015 | 10.109 | 2.452 | 0.026 | 0.000 | 0.000 | 0.000 | 0.000 |
| TNNQSSSQLEVVQKTA | 2016 | 10.102 | 3.295 | 0.000 | 0.000 | 0.000 | 0.309 | 1.567 |
| TNNQSTANAEVVQKTA | 2017 | 10.084 | 5.631 | 0.000 | 0.000 | 0.000 | 0.000 | 0.000 |
| TNNQSSYPATGSQKTA | 2018 | 10.069 | 5.184 | 0.000 | 0.000 | 0.000 | 0.000 | 0.001 |
| TNNQSSPSLEVVQKTA | 2019 | 10.046 | 7.144 | 0.000 | 0.000 | 0.000 | 0.000 | 0.002 |
| TNNAYTYPAEVVQKTA | 2020 | 10.027 | 0.424 | 0.000 | 0.000 | 0.000 | 0.000 | 0.000 |
| TNNQSSYPASVVKKTA | 2021 | 10.026 | 0.746 | 7.839 | 0.000 | 0.000 | 0.000 | 4.347 |
| TYAKSSYPAEVVQKTA | 2022 | 10.011 | 1.568 | 0.000 | 0.000 | 0.000 | 0.000 | 0.000 |
| TNNQSSYPAVGGQKTA | 2023 | 9.968 | 2.899 | 0.000 | 0.000 | 0.000 | 0.000 | 0.000 |

[1519] These data demonstrate that following two maturation approaches, matured TTN-002 capsid variants (AAV5 capsid variants) with loop VIII modifications were generated with significantly enhanced CNS, heart, muscle, and liver tropism in NHPs compared to the corresponding non-matured capsid variants, which already exhibited a significant fold enrichment over AAV5 and/or AAV9 in the brain of mice, rats, and/or NHPs. Also, several of the resulting matured variants demonstrated cross-species CNS tropism in both NHPs and mice.

### Example 5. Evaluation of TTN-002 AAV Capsid Variant in Diverse Primate Species

[1520] This Example evaluates the tropism and cross-species compatibility of the TTN-002 (SEQ ID NO: 982 (amino acid) and 984 (DNA), comprising SEQ ID NO: 943) capsid variant in two diverse primate species, marmosets (Callithrix jacchus) and African green monkeys (Chlorocebus sabaeus), as compared to their tropism in cynomolgus macaques (Macaca fascicularis) provided in Example 1 and 2. The amino acid and DNA sequences of the TTN-002 capsid variant are provided, e.g., in Tables 4 and 5, respectively.

[1521] To investigate tropism in African green monkeys, AAV particles comprising the TTN-002 capsid variant or an AAV5 control under the control of a synapsin promoter, were intravenously injected into the African green monkeys (n=2, 3-12 years of age) at a dose of 2E13 vg/kg. After 14-days in life, the brains and tissues (liver, DRG, quadriceps, and heart) of the NHPs were collected and RNA was extracted. Following RNA recovery and RT-PCR amplification, a systematic NGS enrichment analysis was performed to calculate the fold enrichment ratio relative to the AAV5 wild-type control.

[1522] To investigate tropism in marmoset monkeys, AAV particles comprising the TTN-002 capsid variant, or an AAV5 control, were intravenously injected into marmosets (n=2, >10 months of age) at a dose of 2E13 vg/kg. After 28-days in life, the brains and tissues (liver quadriceps, and heart) of the NHPs were collected and RNA was extracted. Following RNA recovery and RT-PCR amplification, a systematic NGS enrichment analysis was performed to calculate the fold enrichment ratio relative to the AAV5 wild-type control.

[1523] As provided in Table 21 (African green monkeys) and Table 22 (marmosets), the TTN-002 capsid variant demonstrated increased CNS tropism in diverse primate species. The TTN-002 capsid variant demonstrated a 64.9-fold increase in expression relative to AAV5 in the brain of cynomolgus macaques (Table 9, Example 1), a 7.5-fold increase in expression relative to AAV5 in the brain of African green monkeys, and a 40.4-fold increase in expression relative to AAV5 in the brain of marmosets. Furthermore, TTN-002 also resulted in increased expression in the brain of rats (Table 9, Example 1), demonstrating an average fold change in expression relative to AAV5 of 41.1.

TABLE 21
NGS-Fold Enrichment of TTN-002 in African green monkeys

| | SEQ ID | Fold Enrichment relative to AAV9 | | | | | |
|---|---|---|---|---|---|---|---|
| Sequence | NO: | Brain | DRG | Heart | Liver DNA | Liver RNA | Muscle |
| YPAEVVQK | 943 | 7.462 | 3.9674 | 0.3592 | 0.0543 | 0.0227 | 0.6982 |

TABLE 22
NGS-Fold Enrichment of TTN-002 in Marmosets

| | | Fold Enrichment relative to AAV9 | | | | |
|---|---|---|---|---|---|---|
| | SEQ | | | Liver | Liver | |
| Sequence | ID NO: | Brain | Heart | DNA | RNA | Muscle |
| YPAEVVQK | 943 | 40.381 | 3.1981 | 0.0321 | 0.0328 | 2.0631 |

[1524] Taken together, these data demonstrate that the AAV5 capsid variant TTN-002 demonstrated increased CNS tropism relative to the AAV5 control in the CNS across three diverse primate species and rats, providing evidence of strong cross-species capacity.

We claim:

1. An AAV capsid variant, comprising an amino acid sequence having the following formula: [N2]-[N3], wherein:
(i) [N2] comprises positions X1, X2, X3, X4, and X5, wherein:
(a) position X1 is Y, N, or C;
(b) position X2 is P, K, T, or Q;
(c) position X3 is A or P;
(d) position X4 is E, S, or A; and
(e) position X5 is V, L, or E; and
(ii) [N3] comprises the amino acid sequence of VQK, EQK, VKK, VHK, VQQ, or LQK; and
wherein the AAV capsid variant comprises the amino acid sequence of SEQ ID NO: 739, or an amino acid sequence at least 95% identical thereto.

2. The AAV capsid variant of claim 1, wherein:
(a) [N2] comprises YP, NK, YT, YQ, NP, CP, TH, AE, PS, AA, AS, PA, PP, KA, TA, QA, TP, HA, EV, SL, EE, AV, or SH;
(b) [N2] comprises YPA, YPP, NKA, YTA, YQA, YTP, NPA, CPA, THA, PAE, PPS, KAE, TAE, QAE, TPS, PAA, HAS, AEV, PSL, AEE, or AAV;
(c) [N2] comprises YPAE (SEQ ID NO: 21), YPPS (SEQ ID NO: 22), NKAE (SEQ ID NO: 23, YTAE (SEQ ID NO: 24), YQAE (SEQ ID NO: 25), YTPS (SEQ ID NO: 26), YPAA (SEQ ID NO: 27), NPAE (SEQ ID NO: 28), CPAE (SEQ ID NO: 29), THAS (SEQ ID NO: 30), PAEV (SEQ ID NO: 17), PPSL (SEQ ID NO: 31), KAEV (SEQ ID NO: 32), TAEV (SEQ ID NO: 16), PAEE (SEQ ID NO: 18), QAEV (SEQ ID NO: 15), TPSL (SEQ ID NO: 33), PAAV (SEQ ID NO: 34), or QAEE (SEQ ID NO: 35); and/or
(d) [N2] comprises YPAEV (SEQ ID NO: 1), YPPSL (SEQ ID NO: 2), NKAEV (SEQ ID NO: 3), YTAEV (SEQ ID NO: 4), YPAEE (SEQ ID NO: 5), YQAEV (SEQ ID NO: 6), YTPSL (SEQ ID NO: 7), YPAAV (SEQ ID NO: 8), NPAEV (SEQ ID NO: 9), CPAEV (SEQ ID NO: 10), or YQAEE (SEQ ID NO: 11).

3. The AAV capsid variant of claim 1 or 2, wherein [N2]-[N3] comprises:
(i) the amino acid sequence of AEVVQK (SEQ ID NO: 36), PSLVQK (SEQ ID NO: 37), AEVEQK (SEQ ID NO: 38), AEEVQK (SEQ ID NO: 39), PSLEQK (SEQ ID NO: 40), PSLVKK (SEQ ID NO: 41), AEVVKK (SEQ ID NO: 42), AEVVHK (SEQ ID NO: 43), AAVVQK (SEQ ID NO: 44), AEVVQQ (SEQ ID NO: 45), or AEVLQK (SEQ ID NO: 46)
(ii) the amino acid sequence of PAEVVQK (SEQ ID NO: 20), PPSLVQK (SEQ ID NO: 47), KAEVVQK (SEQ ID NO: 48), TAEVVQK (SEQ ID NO: 49), PAEVEQK (SEQ ID NO: 50), PAEEVQK (SEQ ID NO: 51), QAEVVQK (SEQ ID NO: 52), TPSLVQK (SEQ ID NO: 53), PPSLEQK (SEQ ID NO: 54), PPSLVKK (SEQ ID NO: 55), PAEVVKK (SEQ ID NO: 56), PAEVVHK (SEQ ID NO: 57), PAAVVQK (SEQ ID NO: 58), PAEVVQQ (SEQ ID NO: 59), TAEVVKK (SEQ ID NO: 60), PAEVLQK (SEQ ID NO: 61), or QAEEVQK (SEQ ID NO: 62).

4. The AAV capsid variant of any one of claims 1-3, wherein [N2]-[N3] comprises YPAEVVQK (SEQ ID NO: 943), YPPSLVQK (SEQ ID NO: 946), NKAEVVQK (SEQ ID NO: 947), YTAEVVQK (SEQ ID NO: 948), YPAEVEQK (SEQ ID NO: 949), YPAEEVQK (SEQ ID NO: 950, YQAEVVQK (SEQ ID NO: 951), YTPSLVQK (SEQ ID NO: 952), YPPSLEQK (SEQ ID NO: 953, YPPSLVKK (SEQ ID NO: 954), YPAEVVKK (SEQ ID NO: 955), YPAEVVHK (SEQ ID NO: 956, YPAAVVQK (SEQ ID NO: 957), NPAEVVQK (SEQ ID NO: 958), YPAEVVQQ (SEQ ID NO: 959), CPAEVVQK (SEQ ID NO: 960), YTAEVVKK (SEQ ID NO: 961), YPAEVLQK (SEQ ID NO: 962), or YQAEEVQK (SEQ ID NO: 963).

5. The AAV capsid variant of any one of claims 1-4, which further comprises [N1], wherein [N1] comprises positions X_{D}, X_{E}, and X_{F}, wherein:
(a) position X_{D} is Q, T, S, A, I, L, or H;
(b) position X_{E} is S, G, A, or R; and
(c) position X_{F} is S, K, L, R, A, or T.

6. The AAV capsid variant of claim 5, wherein [N1]:
(a) comprises SK, SL, SS, SR, GA, GS, AS, ST, RS, QS, TS, AG, IG, QA, LG, HS, LS, or QR; and/or
(b) comprises QSS, QSK, TSL, SSS, QSR, AGA, IGS, QAS, ASS, LGS, QST, HSS, LSS, or QRS.

7. The AAV capsid variant of claim 5 or 6, wherein [N1]-[N2] comprises QSSYPAEV (SEQ ID NO: 96, QSKYPAEV (SEQ ID NO: 97), TSLYPAEV (SEQ ID NO: 98), SSSYPAEV (SEQ ID NO: 99), QSRYPAEV (SEQ ID NO: 100), QSSYPPSL (SEQ ID NO: 101), AGAYPAEV (SEQ ID NO: 102), IGSYPAEV (SEQ ID NO: 103), QASYPAEV (SEQ ID NO: 104), ASSYPAEV (SEQ ID NO: 105), LGSYPAEV (SEQ ID NO: 106), QSTNKAEV (SEQ ID NO: 107), HSSYPAEV (SEQ ID NO: 108), SSSYTAEV (SEQ ID NO: 109), TSLYPAEE (SEQ ID NO: 110), ASSYQAEV (SEQ ID NO: 111), QSSYTPSL (SEQ ID NO: 112), QSRYPAEE (SEQ ID NO: 113), LSSYQAEV (SEQ ID NO: 114), HSSYPAAV (SEQ ID NO: 115), QSSNPAEV (SEQ ID NO: 116), QSSYTAEV (SEQ ID NO: 117), TSLCPAEV (SEQ ID NO: 118), QRSYTAEV (SEQ ID NO: 119), or QSSYQAEE (SEQ ID NO: 120).

8. The AAV capsid variant of any one of claims 5-7, wherein:
(a) [N1]-[N2]-[N3] comprises SSYPAEVVQ (SEQ ID NO: 121), SKYPAEVVQ (SEQ ID NO: 122), SLYPAEVVQ (SEQ ID NO: 123), SRYPAEVVQ (SEQ ID NO: 124), SSYPPSLVQ (SEQ ID NO: 125), GAYPAEVVQ (SEQ ID NO: 126), GSYPAEVVQ (SEQ ID NO: 127), ASYPAEVVQ (SEQ ID NO: 128), STNKAEVVQ (SEQ ID NO: 129), SSYTAEVVQ (SEQ ID NO: 130), SKYPAEVEQ (SEQ ID NO: 131), SLYPAEEVQ (SEQ ID NO: 132), SSYQAEVVQ (SEQ ID NO: 133, SSYTPSLVQ (SEQ ID NO: 134), SRYPAEEVQ (SEQ ID NO: 135), SSYPPSLEQ (SEQ ID NO: 136), SSYPPSLVK (SEQ ID NO: 140), SSYPAEVVK (SEQ ID NO: 141), SKYPAEVVH (SEQ ID NO: 142), SSYPAAVVQ (SEQ ID NO: 143), SSNPAEVVQ (SEQ ID NO: 144), SLCPAEVVQ (SEQ ID NO: 145), RSYTAEVVQ (SEQ ID NO: 146), SSYTAEVVK (SEQ ID NO: 147), SSYPAEVLQ (SEQ ID NO: 148), or SSYQAEEVQ (SEQ ID NO: 149); or
(b) [N1]-[N2]-[N3] comprises QSSYPAEVVQK (SEQ ID NO: 150), QSKYPAEVVQK (SEQ ID NO: 151), TSLYPAEVVQK (SEQ ID NO: 152), SSSYPAEVVQK (SEQ ID NO: 153), QSRYPAEVVQK (SEQ ID NO: 154), QSSYPPSLVQK (SEQ ID NO: 155), AGAYPAEVVQK (SEQ ID NO: 156), IGSYPAEVVQK (SEQ ID NO: 157), QASYPAEVVQK (SEQ ID NO: 158), ASSYPAEVVQK (SEQ ID NO: 159), LGSYPAEVVQK (SEQ ID NO: 160), QSTNKAEVVQK (SEQ ID NO: 161), HSSYPAEVVQK (SEQ ID NO: 162), SSSYTAEVVQK (SEQ ID NO: 163), QSKYPAEVEQK (SEQ ID NO: 164), TSLYPAEEVQK (SEQ ID NO: 165), ASSYQAEVVQK (SEQ ID NO: 166), QSSYTPSLVQK (SEQ ID NO: 167), QSRYPAEEVQK (SEQ ID NO: 168), QSSYPPSLEQK (SEQ ID NO: 169), QSSYPPSLVKK (SEQ ID NO: 170), LSSYQAEVVQK (SEQ ID NO: 171), SSSYPAEVVKK (SEQ ID NO: 172), QSKYPAEVVHK (SEQ ID NO: 173), HSSYPAAVVQK (SEQ ID NO: 174), QSSNPAEVVQK (SEQ ID NO: 175), SSSYPAEVVQQ (SEQ ID NO: 176), QSSYTAEVVQK (SEQ ID NO: 177), TSLCPAEVVQK (SEQ ID NO: 178), QRSYTAEVVQK (SEQ ID NO: 179), QSSYTAEVVKK (SEQ ID NO: 180), HSSYPAEVLQK (SEQ ID NO: 181), or QSSYQAEEVQK (SEQ ID NO: 182).

9. The AAV capsid variant of any one of claims 1-8, which further comprises [N0], wherein [N0] comprises positions X_{A}, X_{B}, and X_{C}, wherein:
(a) position X_{A} is T, I, or N;
(b) position X_{B} is N; and
(c) position X_{C} is N, T, S, or K.

10. The AAV capsid variant of claim 9, wherein [N0]:
(a) comprises TN, IN, NN, NT, NS, or NK; or
(b) comprises TNN, TNT, INN, TNS, NNN, or TNK.

11. The AAV capsid variant of claim 9 or 10, wherein [N0]-[N1] comprises TNNQSS (SEQ ID NO: 183, TNNQSK (SEQ ID NO: 184), TNNTSL (SEQ ID NO: 185), TNNSSS (SEQ ID NO: 186), TNNQSR (SEQ ID NO: 187), TNNAGA (SEQ ID NO: 188), TNNIGS (SEQ ID NO: 189), TNNQAS (SEQ ID NO: 190), TNTASS (SEQ ID NO: 191), TNNLGS (SEQ ID NO: 192), TNNQST (SEQ ID NO: 193), TNNHSS (SEQ ID NO: 194), TNNQSK (SEQ ID NO: 184), TNNLSS (SEQ ID NO: 195), INNQSS (SEQ ID NO: 196), TNSQSS (SEQ ID NO: 197), NNNQSR (SEQ ID NO: 198), TNSTSL (SEQ ID NO: 199), TNNQRS (SEQ ID NO: 200), or TNKQAS (SEQ ID NO: 201).

12. The AAV capsid variant of any one of claims 9-11, wherein [N0]-[N1]-[N2]-[N3] comprises TNNQSSYPAEVVQK (SEQ ID NO: 500), TNNQSKYPAEVVQK (SEQ ID NO: 503), TNNTSLYPAEVVQK (SEQ ID NO: 506), TNNSSSYPAEVVQK (SEQ ID NO: 508), TNNQSRYPAEVVQK (SEQ ID NO: 510), TNNQSSYPPSLVQK (SEQ ID NO: 512), TNNAGAYPAEVVQK (SEQ ID NO: 513), TNNIGSYPAEVVQK (SEQ ID NO: 514), TNNQASYPAEVVQK (SEQ ID NO: 517), TNTASSYPAEVVQK (SEQ ID NO: 520), TNNLGSYPAEVVQK (SEQ ID NO: 523), TNNQSTNKAEVVQK (SEQ ID NO: 524), TNNHSSYPAEVVQK (SEQ ID NO: 525), TNNSSSYTAEVVQK (SEQ ID NO: 526), TNNQSKYPAEVEQK (SEQ ID NO: 529), TNNTSLYPAEEVQK (SEQ ID NO: 530), TNTASSYQAEVVQK (SEQ ID NO: 531), TNNQSSYTPSLVQK (SEQ ID NO: 533), TNNQSRYPAEEVQK (SEQ ID NO: 534), TNNQSSYPPSLEQK (SEQ ID NO: 535), TNNQSSYPPSLVKK (SEQ ID NO: 536), TNNLSSYQAEVVQK (SEQ ID NO: 539), TNNSSSYPAEVVKK (SEQ ID NO: 540), TNNQSKYPAEVVHK (SEQ ID NO: 542), INNQSSYPAEVVQK (SEQ ID NO: 543), TNNHSSYPAAVVQK (SEQ ID NO: 545), TNSQSSNPAEVVQK (SEQ ID NO: 548), TNNSSSYPAEVVQQ (SEQ ID NO: 551), NNNQSRYPAEVVQK (SEQ ID NO: 552), TNNQSSYTAEVVQK (SEQ ID NO: 553), TNNTSLCPAEVVQK (SEQ ID NO: 554), TNSTSLYPAEVVQK (SEQ ID NO: 556), TNNQRSYTAEVVQK (SEQ ID NO: 557), TNNQSSYTAEVVKK (SEQ ID NO: 558), TNNHSSYPAEVLQK (SEQ ID NO: 560), TNNQSSYQAEEVQK (SEQ ID NO: 562), or TNKQASYPAEVVQK (SEQ ID NO: 563).

13. The AAV capsid variant of any one of claims 1-12, which further comprises [N4], wherein [N4] comprises positions X_{G} and X_{H}, wherein:
(a) position X_{G} is T, P, or N; and
(b) position X_{H} is A.

14. The AAV capsid variant of claim 13, wherein [N4] comprises TA, PA, or NA.

15. The AAV capsid variant of claim 13 or 14, wherein [N3]-[N4] comprises VQKTA (SEQ ID NO: 564), EQKTA (SEQ ID NO: 565), VKKTA (SEQ ID NO: 566), VQKPA (SEQ ID NO: 567), VHKTA (SEQ ID NO: 568), VQQTA (SEQ ID NO: 569), VQKNA (SEQ ID NO: 570), or LQKTA (SEQ ID NO: 571).

16. The AAV capsid variant of any one of claims 13-15, wherein [N0]-[N1]-[N2]-[N3]-[N4] comprises TNNQSSYPAEVVQKTA (SEQ ID NO: 1533), TNNQSKYPAEVVQKTA (SEQ ID NO: 1538), TNNTSLYPAEVVQKTA (SEQ ID NO: 1232), TNNSSSYPAEVVQKTA (SEQ ID NO: 1539), TNNQSRYPAEVVQKTA (SEQ ID NO: 1327), TNNQSSYPPSLVQKTA (SEQ ID NO: 1300), TNNAGAYPAEVVQKTA (SEQ ID NO: 1021), TNNIGSYPAEVVQKTA (SEQ ID NO: 1112), TNNQASYPAEVVQKTA (SEQ ID NO: 1194), TNTASSYPAEVVQKTA (SEQ ID NO: 1575), TNNLGSYPAEVVQKTA (SEQ ID NO: 1027), TNNQSTNKAEVVQKTA (SEQ ID NO: 1578), TNNHSSYPAEVVQKTA (SEQ ID NO: 1310), TNNQSKYPAEVVQKTA (SEQ ID NO: 1538), TNNSSSYTAEVVQKTA (SEQ ID NO: 1214), TNNQSKYPAEVEQKTA (SEQ ID NO: 1254), TNNTSLYPAEEVQKTA (SEQ ID NO: 1583), TNTASSYQAEVVQKTA (SEQ ID NO: 1584), TNNQSSYTPSLVQKTA (SEQ ID NO: 1585), TNNQSRYPAEEVQKTA (SEQ ID NO: 1342), TNNQSSYPPSLEQKTA (SEQ ID NO: 1590), TNNQSSYPPSLVKKTA (SEQ ID NO: 1591), TNNLSSYQAEVVQKTA (SEQ ID NO: 1592), TNNQSSYPPSLVQKPA (SEQ ID NO: 1593), TNNSSSYPAEVVKKTA (SEQ ID NO: 1331), TNNQSKYPAEVVHKTA (SEQ ID NO: 1453), TNNSSSYPAEVVQKPA (SEQ ID NO: 1142), INNQSSYPAEVVQKTA (SEQ ID NO: 1024), TNNHSSYPAAVVQKTA (SEQ ID NO: 1598), TNSQSSNPAEVVQKTA (SEQ ID NO: 1599), TNNSSSYPAEVVQQTA (SEQ ID NO: 1419), NNNQSRYPAEVVQKTA (SEQ ID NO: 1601), TNNQSSYTAEVVQKNA (SEQ ID NO: 1602), TNNTSLCPAEVVQKTA (SEQ ID NO: 1603), TNSTSLYPAEVVQKTA (SEQ ID NO: 1605), TNNQRSYTAEVVQKTA (SEQ ID NO: 1604), TNNQSSYTAEVVKKTA (SEQ ID NO: 1606), TNNHSSYPAEVLQKTA (SEQ ID NO: 1607), TNNQSSYQAEEVQKTA (SEQ ID NO: 1608), or TNKQASYPAEVVQKTA (SEQ ID NO: 1587).

17. The AAV capsid variant of any one of claims 1-16, wherein:
(a) [N2]-[N3] is present in loop VIII; and/or
(b) [N0], [N1], and [N4] are present in loop VIII;
wherein loop VIII comprises positions 571-599 of SEQ ID NO: 982.

18. The AAV capsid variant of any one of claims 1-17, wherein:
(i) X_{A} of [N0] is present at position 571, X_{B} of [N0] is present at position 572, and X_{C} of [N0] is present at position 573, numbered according to SEQ ID NO: 982;
(ii) X_{D} of [N1] is present at position 574, X_{E} of [N1] is present at position 575, and X_{F} of [N1] is present at position 576, numbered according to SEQ ID NO: 982;
(iii) X1 of [N2] is present at position 577, X2 of [N2] is present at position 578, X3 of [N2] is present at position 579, X4 of [N2] is present at position 580, and X5 of [N2] is present at position 581, numbered according to SEQ ID NO: 982;
(iv) [N3] is present at positions 582-584, numbered according to SEQ ID NO: 982; and/or
(v) X_{G} of [N4] is present at position 585 and X_{H} of [N4] is present at position 586, numbered according to SEQ ID NO: 982.

19. An AAV capsid variant comprising:
(a) the amino acid sequence of any of the sequences provided in Tables 1, 2A, 2B, 9, or 15-20;
(b) an amino acid sequence comprising at least 3, 4, 5, 6, 7, 8, 9, 10, 11, 12, 13, 14, or 15 consecutive amino acids from any one of the sequences provided in Tables 1, 2A, 2B, 9, or 15-20; or
(c) an amino acid sequence comprising one, two, or three but no more than four different amino acids, relative to the amino acid sequence of any one of the amino acid sequences provided in Tables 1, 2A, 2B, 9, or 15-20.

20. The AAV capsid variant of any one of claims 1-19, comprising:
(a) the amino acid sequence of any of SEQ ID NOs: 943, 1021, 1024, 1027, 1112, 1142, 1214, 1232, 1254, 1300, 1310, 1327, 1331, 1342, 1419, 1453, 1533, 1538, 1539, 1575, 1578, 1583-1587, 1590, 1591-1593, 1598-1608, or 1610-1624;
(b) an amino acid sequence comprising at least 3, 4, 5, 6, 7, 8, 9, 10, 11, 12, 13, 14, or 15 consecutive amino acids from any one of SEQ ID NOs: 943, 1021, 1024, 1027, 1112, 1142, 1214, 1232, 1254, 1300, 1310, 1327, 1331, 1342, 1419, 1453, 1533, 1538, 1539, 1575, 1578, 1583-1587, 1590, 1591-1593, 1598-1608, or 1610-1624; or
(c) an amino acid sequence comprising one, two, or three but no more than four different amino acids, relative to the amino acid sequence of any one of SEQ ID NOs: 943, 1021, 1024, 1027, 1112, 1142, 1214, 1232, 1254, 1300, 1310, 1327, 1331, 1342, 1419, 1453, 1533, 1538, 1539, 1575, 1578, 1583-1587, 1590, 1591-1593, 1598-1608, or 1610-1624.

21. The AAV capsid variant of claim 19 or 20, wherein:
(i) the 3 consecutive amino acids comprise YPA;
(ii) the 4 consecutive amino acids comprise YPAE (SEQ ID NO: 21);
(iii) the 5 consecutive amino acids comprise YPAEV (SEQ ID NO: 1);
(iv) the 6 consecutive amino acids comprise YPAEVV (SEQ ID NO: 725);
(v) the 7 consecutive amino acids comprise YPAEVVQ (SEQ ID NO: 726); and/or
(vi) the amino acid sequence comprises YPAEVVQK (SEQ ID NO: 943).

22. The AAV capsid variant of any one of claims 19-21, which comprises the amino acid sequence YPAEVVQK (SEQ ID NO: 943) or an amino acid sequence comprising one, two, or three but no more than four different amino acids relative to the amino acid sequence of YPAEVVQK (SEQ ID NO: 943).

23. The AAV capsid variant of any one of claims 1-22, wherein:
(i) the AAV capsid variant comprises an amino acid sequence encoded by the nucleotide sequence of SEQ ID NO: 944; or a nucleotide sequence comprising at least one, two, three, four, five, six, or seven, but no more than ten different nucleotides relative to the nucleotide sequence of SEQ ID NO: 944; and/or
(ii) the nucleotide sequence encoding the capsid variant comprises the nucleotide sequence of SEQ ID NO: 944; or a nucleotide sequence comprising at least one, two, three, four, five, six, or seven, but no more than ten different nucleotides relative to the nucleotide sequence of SEQ ID NO: 944.

24. The AAV capsid variant of any one of claims 1-23, wherein the amino acid Y is present at position 577, and the amino acid sequence of PAEVVQK (SEQ ID NO: 20) is present at positions 578-584, numbered relative to SEQ ID NO: 982.

25. The AAV capsid variant of any one of the preceding claims, which comprises the amino acid sequence of SEQ ID NO: 739.

26. The AAV capsid variant of any one of the preceding claims, which comprises the amino acid sequence of SEQ ID NO: 738, or an amino acid sequence with at least 95% sequence identity thereto, optionally wherein the AAV capsid variant comprises the amino acid sequence of SEQ ID NO: 738.

27. The AAV capsid variant, of any one of claims 1-26, wherein:
(i) the AAV capsid variant comprises the amino acid sequence of SEQ ID NO: 982, or an amino acid sequence with at least 95% sequence identity thereto, optionally wherein the AAV capsid variant comprises the amino acid sequence of SEQ ID NO: 982; and/or
(ii) the nucleotide sequence encoding the AAV capsid variant comprises the nucleotide sequence of SEQ ID NO: 984, or a nucleotide sequence with at least 90% sequence identity thereto, optionally wherein the nucleotide sequence is codon optimized.

28. An AAV capsid variant comprising the amino acid sequence of SEQ ID NO: 982.

29. The AAV capsid variant, of any one of claims 1-28, wherein the AAV capsid variant
(i) which has an increased tropism for a CNS cell or tissue, e.g., a brain cell, brain tissue, spinal cord cell, or spinal cord tissue, relative to the tropism of a reference sequence comprising the amino acid sequence of SEQ ID NO: 138, 139, or 982;
(ii) transduces a brain region, e.g., a temporal cortex, perirhinal cortex, globus pallidus, putamen, caudate, thalamus, hippocampus, geniculate nucleus, Purkinje Layer, deep cerebellar nuclei, and/or cerebellum, optionally wherein the level of transduction is at least 1.5, 2.2, 2.4, 2.5, 2.6, 2.7, 3.0, 3.2, 3.5, 3.7, 4.0, 4.2, 4.5, 4.7, 4.9, 5, 10, 15, 20, 25, 30, 35-fold greater as compared to a reference sequence of SEQ ID NO: 139, e.g., when measured by an assay, e.g., an immunohistochemistry assay or a qPCR assay, e.g., as described in Example 2;
(iii) is enriched at least about 2, 3, 4, 5, 6, 7, 8, 9, 10, 12, 15, 17, 20, 25, 30, 35, 40, 45, 50, 55, 60, or 65-fold, in the brain compared to a reference sequence of SEQ ID NO: 138, e.g., when measured by an assay as described in Example 1;
(iv) is enriched at least about 10, 12, 15, 17, 20, 25, 30, 35, 40, 45, 50, 55, 60, 61, 62, 63, 64, or 65-fold, in the brain compared to a reference sequence of SEQ ID NO: 138, e.g., when measured by an assay as described in Example 1;
(v) is enriched at least about 2, 3, 4, 5, 6, 7, 8, 9, 10, 12, 15, 17, 20, 25, 30, 35, 40, 45-fold, in the brain of at least two to three species, e.g., a non-human primate and rodent (e.g., rat or mouse), compared to a reference sequence of SEQ ID NO: 138, e.g., when measured by an assay as described in Examples 1, 2, and 4;
(vi) is enriched at least about 5, 10, 15, 20, 25, 30, 35, 40, 45, 50, 55, 60, 65, 70, 75, 80, 85, 90, 100, 125, 150, 175, 200, or 225-fold, in the brain compared to a reference sequence of SEQ ID NO: 982, e.g., when measured by an assay as described in Example 4;
(vii) delivers an increased level of a payload to a brain region, optionally wherein the level of the payload is increased by at least 20, 25, 30, 35-fold, as compared to a reference sequence of SEQ ID NO: 139, e.g., when measured by an assay, e.g., a qRT-PCR or a qPCR assay (e.g., as described in Example 2), optionally wherein the brain region is a temporal cortex, perirhinal cortex, globus pallidus, putamen, caudate, thalamus, hippocampus, geniculate nucleus, Purkinje Layer, deep cerebellar nuclei, and/or cerebellum;
(viii) delivers an increased level of viral genomes to a brain region, optionally wherein the level of viral genomes is increased by at least 1.5, 2.2, 2.4, 2.5, 2.6, 2.7, 3.0, 3.2, 3.5, 3.7, 4.0, 4.2, 4.5, 4.7, 4.9, or 5-fold, as compared to a reference sequence of SEQ ID NO: 139, e.g., when measured by an assay, e.g., a qRT-PCR or a qPCR assay (e.g., as described in Example 2), optionally wherein the brain region is a temporal cortex, perirhinal cortex, globus pallidus, putamen, caudate, thalamus, hippocampus, geniculate nucleus, Purkinje Layer, deep cerebellar nuclei, and/or cerebellum;
(ix) enriched at least about 3, 3.5, 4.0, 4.5, 5, 5.0, 6.0, or 6.5-fold, in a spinal cord region compared to a reference sequence of SEQ ID NO: 139, e.g., when measured by an assay as described in Example 2, optionally wherein the spinal cord region is a cervical region, a lumbar region, a thoracic region, or a combination thereof;
(x) shows preferential transduction in a brain region relative to the transduction in the dorsal root ganglia (DRG);
(xi) shows preferential transduction in a brain region relative to the transduction in the liver; and/or
(xii) is capable of transducing neuronal cell and non-neuronal cells, e.g., glial cells (e.g., oligodendrocytes or astrocytes).

30. A polynucleotide encoding the AAV capsid variant of any one of claims 1-29.

31. The polynucleotide of claim 30, which comprises:
(i) a nucleotide sequence comprising at least one, two, three, four, five, six, or seven, but no more than ten different nucleotides, relative to the nucleotide sequences of SEQ ID NO: 944;
(iii) the nucleotide sequence of SEQ ID NO: 944, or nucleotide sequence substantially identical (e.g., having at least 70%, 75%, 80%, 85%, 90%, 92%, 95%, 97%, 98%, or 99% sequence identity) thereto; and/or
(iv) the nucleotide sequence of SEQ ID NO: 984, or a nucleotide sequence with at least 80% (e.g., at least about 85, 90, 95, 96, 97, 98, or 99%) sequence identity thereto,
optionally wherein the polynucleotide comprises a nucleotide sequence that is codon optimized.

32. A peptide comprising:
(a) the amino acid sequence of any of the sequences provided in Tables 1, 2A, 2B, 9, or 15-20;
(b) an amino acid sequence comprising at least 3, 4, 5, 6, 7, 8, 9, 10, 11, 12, 13, 14, or 15 consecutive amino acids from any one of the sequences provided in Tables 1, 2A, 2B, 9, or 15-20; or
(c) an amino acid sequence comprising one, two, or three but no more than four different amino acids, relative to the amino acid sequence of any one of the amino acid sequences provided in Tables 1, 2A, 2B, 9, or 15-20.

33. A peptide comprising:
(i) the amino acid sequence of YPAEVVQK (SEQ ID NO: 943);
(ii) an amino acid sequence comprising one, two, or three, but no more than four different amino acids relative to the amino acid sequence of YPAEVVQK (SEQ ID NO: 943); or
(iii) at least 3, 4, 5, 6, or 7 consecutive amino acids from the amino acid sequence of YPAEVVQK (SEQ ID NO: 943).

34. An AAV particle comprising the AAV capsid variant of any one of claims 1-29, an AAV capsid variant encoded by the polynucleotide of claim 30 or 31, or an AAV capsid variant comprising the peptide of claim 32 or 33.

35. The AAV particle of claim 34, which comprises a nucleotide sequence encoding a payload, optionally wherein the encoded payload comprises a therapeutic protein or functional variant thereof;
an antibody or antibody fragment; an enzyme; a component of a gene editing system; an RNAi agent (e.g., a dsRNA, siRNA, shRNA, pre-miRNA, pri-miRNA, miRNA, stRNA, lncRNA, piRNA, or snoRNA); or a combination thereof.

36. The AAV particle of claim 35, wherein:
(i) the therapeutic protein or functional variant thereof, e.g., a recombinant protein, is associated with (e.g., aberrantly expressed in) a neurological or neurodegenerative disorder, a muscular or neuromuscular disorder, or a neuro-oncological disorder, optionally wherein the therapeutic protein or functional variant thereof is chosen from apolipoprotein E (APOE) (e.g., ApoE2, ApoE3 and/or ApoE4); human survival of motor neuron (SMN) 1 or SMN2; glucocerebrosidase (GBA1); aromatic L-amino acid decarboxylase (AADC); aspartoacylase (ASPA); tripeptidyl peptidase I (CLN2); beta-galactosidase (GLB1); N-sulphoglucosamine sulphohydrolase (SGSH); N-acetyl-alpha-glucosaminidase (NAGLU); iduronate 2-sulfatase (IDS); intracellular cholesterol transporter (NPC1); gigaxonin (GAN); or a combination thereof;
(ii) the antibody or antibody binding fragment binds to
(a) a CNS related target, e.g. an antigen associated with a neurological or neurodegenerative disorder, e.g., β-amyloid, APOE, tau, SOD1, TDP-43, huntingtin (HTT), and/or synuclein;
(b) a muscular or neuromuscular related target, e.g., an antigen associated with a muscular or neuromuscular disorder; or
(c) a neuro-oncology related target, e.g., an antigen associated with a neuro-oncological disorder, e.g., HER2, or EGFR (e.g., EGFRvIII);
(iii) the enzyme comprises a meganuclease, a zinc finger nuclease, a TALEN, a recombinase, integrase, a base editor, a Cas9, or a fragment thereof;
(iv) the component of a gene editing system comprises one or more components of a CRISPR-Cas system, optionally wherein the one or more components of the CRISPR-Cas system comprises a Cas9, e.g., a Cas9 ortholog or a Cpf1, and a single guide RNA (sgRNA), wherein:
(a) the sgRNA is located upstream (5′) of the cas9 enzyme; and/or
(b) the sgRNA is located downstream (3′) of the cas9 enzyme; and/or
(v) the RNAi agent (e.g., a dsRNA, siRNA, shRNA, pre-miRNA, pri-miRNA, miRNA, stRNA, lncRNA, piRNA, or snoRNA), modulates, e.g., inhibits, expression of, a CNS related gene, mRNA, and/or protein, optionally wherein the CNS related gene is chosen from SOD1, MAPT, APOE, HTT, C9ORF72, TDP-43, APP, BACE, SNCA, ATXNI, ATXN3, ATXN7, SCNIA-SCN5A, SCN8A-SCN11A, or a combination thereof.

37. The AAV particle of any one of claims 34-36, which comprises a viral genome comprising a promoter operably linked to the nucleic acid sequence encoding the payload, optionally wherein:
(i) the promoter is chosen from human elongation factor 1α-subunit (EF1α), cytomegalovirus (CMV) immediate-early enhancer and/or promoter, chicken β-actin (CBA) and its derivative CAG, β glucuronidase (GUSB), or ubiquitin C (UBC), neuron-specific enolase (NSE), platelet-derived growth factor (PDGF), platelet-derived growth factor B-chain (PDGF-β), intercellular adhesion molecule 2 (ICAM-2), synapsin (Syn), methyl-CpG binding protein 2 (MeCP2), Ca2+/calmodulin-dependent protein kinase II (CaMKII), metabotropic glutamate receptor 2 (mGluR2), neurofilament light chain (NFL) or heavy chain (NFH), β-globin minigene nβ2, preproenkephalin (PPE), enkephalin (Enk) and excitatory amino acid transporter 2 (EAAT2), glial fibrillary acidic protein (GFAP), myelin basic protein (MBP), a cardiovascular promoter (e.g., aMHC, cTnT, and CMV-MLC2k), a liver promoter (e.g., hAAT, TBG), a skeletal muscle promoter (e.g., desmin, MCK, C512) or a fragment, e.g., a truncation, or a functional variant thereof;
(ii) the promoter is an EF-1a promoter variant, e.g., a truncated EF-1a promoter; or
(iii) the promoter comprises the nucleotide sequence of any one of SEQ ID NOs: 987-1007, a nucleotide sequence comprising at least one, two, three, four, five, six, or seven but no more than four modifications, e.g., substitutions, relative to the nucleotide sequence of SEQ ID NOs: 987-1007, or a nucleotide sequence with at least 80% (e.g., 85%, 90%, 95%, 96%, 97%, 98%, or 99%) sequence identity to any one of SEQ ID NOs: 987-1007.

38. The AAV particle of claim 37, wherein the viral genome further comprises:
(i) a poly A signal sequence;
(ii) an inverted terminal repeat (ITR) sequence, optionally wherein the ITR sequence is positioned 5′ relative to the encoded payload and/or the ITR sequence is positioned 3′ relative to the encoded payload;
(iii) an enhancer, a Kozak sequence, an intron region, and/or an exon region; and/or
(iv) a nucleotide sequence encoding a miR binding site, e.g., a miR binding site that modulates, e.g., reduces, expression of the antibody molecule encoded by the viral genome in a cell or tissue where the corresponding miRNA is expressed, optionally wherein the encoded miR binding site modulates, e.g., reduces, expression of the encoded antibody molecule in a cell or tissue of the DRG, liver, heart, hematopoietic lineage, or a combination thereof.

39. The AAV particle of claim 38, wherein the viral genome comprises:
(i) at least 1-5 copies of the encoded miR binding site, e.g., at least 1, 2, 3, 4, or 5 copies;
(ii) at least 3 copies of an encoded miR binding sites, optionally wherein:
(a) all three copies comprise the same miR binding site, or at least one, two, three, or all of the copies comprise a different miR binding site; and/or
(b) the 3 copies of the encoded miR binding sites are continuous (e.g., not separated by a spacer), or are separated by a spacer, optionally wherein the spacer comprises the nucleotide sequence of GATAGTTA, or a nucleotide sequence having at least one, two, or three modifications, e.g., substitutions (e.g., conservative substitutions), but no more than four modifications, e.g., substitutions (e.g., conservative substitutions), relative to GATAGTTA; or
(iii) at least 4 copies of an encoded miR binding site, optionally wherein
(a) all four copies comprise the same miR binding site, or at least one, two, three, or all of the copies comprise a different miR binding site; and/or
(b) the 4 copies of the encoded miR binding sites are continuous (e.g., not separated by a spacer), or are separated by a spacer, optionally wherein the spacer comprises the nucleotide sequence of GATAGTTA, or a nucleotide sequence having at least one, two, or three modifications, e.g., substitutions (e.g., conservative substitutions), but no more than four modifications, e.g., substitutions (e.g., conservative substitutions), relative to GATAGTTA.

40. The AAV particle of claim 38 or 39, wherein the encoded miR binding site comprises a miR122 binding site, a miR183 binding site, a miR-1 binding site, a miR-142-3p, or a combination thereof, optionally wherein:
(i) the encoded miR122 binding site comprises the nucleotide sequence of SEQ ID NO: 4673, or a nucleotide sequence substantially identical (e.g., having at least 70%, 75%, 80%, 85%, 90%, 92%, 95%, 97%, 98%, or 99% sequence identity) thereto; or a nucleotide sequence comprising at least one, two, three, four, five, six, or seven modifications, e.g., substitutions, insertions, or deletions, but no more than ten modifications, e.g., substitutions, insertions, or deletions, relative to SEQ ID NO: 4673;
(ii) the encoded miR183 binding site comprises the nucleotide sequence of SEQ ID NO: 4676, or a nucleotide sequence substantially identical (e.g., having at least 70%, 75%, 80%, 85%, 90%, 92%, 95%, 97%, 98%, or 99% sequence identity) thereto; or a nucleotide sequence comprising at least one, two, three, four, five, six, or seven modifications, e.g., substitutions, insertions, or deletions, but no more than ten modifications, e.g., substitutions, insertions, or deletions, relative to SEQ ID NO: 4676;
(iii) the encoded miR-1 binding site comprises the nucleotide sequence of SEQ ID NO: 4679, or a nucleotide sequence substantially identical (e.g., having at least 70%, 75%, 80%, 85%, 90%, 92%, 95%, 97%, 98%, or 99% sequence identity) thereto; or a nucleotide sequence comprising at least one, two, three, four, five, six, or seven modifications, e.g., substitutions, insertions, or deletions, but no more than ten modifications, e.g., substitutions, insertions, or deletions, relative to SEQ ID NO: 4679; and/or
(iv) the encoded miR-142-3p binding site comprises the nucleotide sequence of SEQ ID NO: 4675, or a nucleotide sequence substantially identical (e.g., having at least 70%, 75%, 80%, 85%, 90%, 92%, 95%, 97%, 98%, or 99% sequence identity) thereto; or a nucleotide sequence comprising at least one, two, three, four, five, six, or seven modifications, e.g., substitutions, insertions, or deletions, but no more than ten modifications, e.g., substitutions, insertions, or deletions, relative to SEQ ID NO: 4675.

41. The AAV particle of any one of claims 37-40, wherein the viral genome is:
(i) single stranded; or
(ii) self-complementary

42. The AAV capsid variant, polynucleotide, peptide, or AAV particle of any one of the preceding claims which is isolated, e.g., recombinant.

43. A vector comprising a polynucleotide encoding the AAV capsid variant of any one of claim 1-29 or 42, the polynucleotide of any one of claim 30, 31, or 42, or a polynucleotide encoding the peptide of any one of claim 32, 33, or 42.

44. A cell, e.g., a host cell, comprising the AAV capsid variant of any one of claim 1-29 or 42, the polynucleotide of any one of claim 30, 31, or 42, a polynucleotide encoding the peptide of any one of claim 32, 33, or 42, the AAV particle of any one of claims 34-42, or the vector of claim 43, optionally wherein:
(i) the cell is a mammalian cell or an insect cell;
(ii) the cell is a cell of a brain region or a spinal cord region, optionally a cell of the brain stem, hippocampus, or thalamus; and/or
(iii) the cell is a neuron, a sensory neuron, a motor neuron, an astrocyte, a glial cell, oligodendrocyte, or a muscle cell (e.g., a cell of the heart, diaphragm, or quadriceps).

45. A method of making an AAV particle, comprising
(i) providing a host cell comprising a viral genome; and
(ii) incubating the host cell under conditions suitable to enclose the viral genome in the AAV capsid variant of any one of claim 1-29 or 42, or an AAV capsid variant encoded by the polynucleotide of any one of claim 30, 31, or 32;
thereby making the AAV particle.

46. A pharmaceutical composition comprising the AAV particle of any one of claims 34-42, an AAV particle comprising the AAV capsid variant of any one of claim 1-29 or 42, an AAV particle comprising the peptide of any one of claim 32, 33, or 42, and a pharmaceutically acceptable excipient.

47. A method of delivering a payload to a cell or tissue (e.g., a CNS cell or a CNS tissue), comprising administering an effective amount of the pharmaceutical composition of claim 46, the AAV particle of any one of claims 34-42, an AAV particle comprising the AAV capsid variant of any one of claim 1-29 or 42, or an AAV particle comprising the peptide of any one of claim 32, 33, or 42.

48. The method of claim 47, wherein the cell is:
(i) a cell of a brain region or a or a spinal cord region, optionally a cell of the temporal cortex, perirhinal cortex, globus pallidus, putamen, caudate, thalamus, hippocampus, geniculate nucleus, Purkinje Layer, deep cerebellar nuclei, cerebellum, cervical spinal cord region, thoracic spinal cord region, lumbar spinal cord region, or a combination thereof;
(ii) is a cell of the heart, e.g., a heart atrium or a heart ventricle;
(iii) is a cell of the muscle (e.g., a cell of the quadriceps) or liver;
(iv) a neuron, a sensory neuron, a motor neuron, an astrocyte, a glial cell, or an oligodendrocyte;
(v) within a subject, optionally wherein the subject has, has been diagnosed with having, or is at risk of having a genetic disorder (e.g., a monogenic disorder or a polygenic disorder), a neurological disorder (e.g., a neurodegenerative disorder), a neuro-oncological disorder, a muscular disorder, or a neuromuscular disorder.

49. A method of treating a subject having or diagnosed with having a genetic disorder, e.g., a monogenic disorder or a polygenic disorder, comprising administering to the subject an effective amount of the pharmaceutical composition of claim 46, the AAV particle of any one of claims 34-42, an AAV particle comprising the AAV capsid variant of any one of claim 1-29 or 42, or an AAV particle comprising the peptide of any one of claim 32, 33, or 42.

50. A method of treating a subject having or diagnosed with having a neurological disorder, e.g., a neurodegenerative disorder, a neuro-oncological disorder, a muscular disorder, or a neuromuscular disorder, comprising administering to the subject an effective amount of the pharmaceutical composition of claim 46, the AAV particle of any one of claims 34-42, an AAV particle comprising the AAV capsid variant of any one of claim 1-29 or 42, or an AAV particle comprising the peptide of any one of claim 32, 33, or 42.

51. A method of treating a subject having or diagnosed with having a muscular disorder or a neuromuscular disorder, comprising administering to the subject an effective amount of the pharmaceutical composition of claim 46, the AAV particle of any one of claims 34-42, an AAV particle comprising the AAV capsid variant of any one of claim 1-29 or 42, an AAV particle comprising the peptide of any one of claim 32, 33, or 42.

52. A method of treating a subject having or diagnosed with having a neuro-oncological disorder, comprising administering to the subject an effective amount of the pharmaceutical composition of claim 46, the AAV particle of any one of claims 34-42, an AAV particle comprising the AAV capsid variant of any one of claim 1-29 or 42, or an AAV particle comprising the peptide of any one of claim 32, 33, or 42.

53. The method of any one of claims 48-52, wherein the genetic disorder, neurological disorder, neurodegenerative disorder, muscular disorder, neuromuscular disorder, or neuro-oncological disorder is Huntington's Disease, Amyotrophic Lateral Sclerosis (ALS), Gaucher Disease, Dementia with Lewy Bodies, Parkinson's disease, Spinal Muscular Atrophy, Alzheimer's Disease, a leukodystrophy (e.g., Alexander disease, autosomal dominant leukodystrophy with autonomic diseases (ADLD), Canavan disease, cerebrotendinous xanthomatosis (CTX), metachromatic leukodystrophy (MLD), Pelizaeus-Merzbacher disease, or Refsum disease), or a cancer (e.g., a HER2/neu positive cancer or a glioblastoma).

54. The method of any one of claims 49-53, wherein treating comprises prevention of progression of the disease or disorder in the subject.

55. The method of any one of claims 48-54, wherein the subject is a human.

56. The method of any one of claims 48-55, wherein the AAV particle is administered to the subject:
(i) intravenously, via intra-cisterna magna injection (ICM), intracerebrally, intrathecally, intracerebroventricularly, via intraparenchymal administration, or intramuscularly;
(ii) via focused ultrasound (FUS), e.g., coupled with the intravenous administration of microbubbles (FUS-MB), or MRI-guided FUS coupled with intravenous administration; or
(iii) intravenously.

57. The pharmaceutical composition of claim 46, the AAV particle of any one of claims 34-42, an AAV particle comprising the AAV capsid variant of any one of claim 1-29 or 42, or an AAV particle comprising the peptide of any one of claim 32, 33, or 42, for use in a method of delivering a payload to a cell or tissue.

58. The pharmaceutical composition of claim 46, the AAV particle of any one of claims 34-42, an AAV particle comprising the AAV capsid variant of any one of claim 1-29 or 42, or an AAV particle comprising the peptide of any one of claim 32, 33, or 42, for use in a method of treating a genetic disorder, a neurological disorder, a neurodegenerative disorder, a muscular disorder, a neuromuscular disorder, or a neuro-oncological disorder.

59. The pharmaceutical composition of claim 46, the AAV particle of any one of claims 34-42, an AAV particle comprising the AAV capsid variant of any one of claim 1-29 or 42, or an AAV particle comprising the peptide of any one of claim 32, 33, or 42, for use in the manufacture of a medicament.

60. Use of the pharmaceutical composition of claim 46, the AAV particle of any one of claims 34-42, an AAV particle comprising the AAV capsid variant of any one of claim 1-29 or 42, or an AAV particle comprising the peptide of any one of claim 32, 33, or 42, in the manufacture of a medicament.

61. Use of the pharmaceutical composition of claim 46, the AAV particle of any one of claims 34-42, an AAV particle comprising the AAV capsid variant of any one of claim 1-29 or 42, or an AAV particle comprising the peptide of any one of claim 32, 33, or 42, in the manufacture of a medicament for treating a genetic disorder, a neurological disorder, a neurodegenerative disorder, a muscular disorder, a neuromuscular disorder, or a neuro-oncological disorder.

The application's sequence listing, which the Patent Office published only in electronic form, follows.

SEQUENCE LISTING (4679 sequences)

SEQ ID NO: 1 - protein, 5 aa, synthetic construct
YPAEV

SEQ ID NO: 2 - protein, 5 aa, synthetic construct
YPPSL

SEQ ID NO: 3 - protein, 5 aa, synthetic construct
NKAEV

SEQ ID NO: 4 - protein, 5 aa, synthetic construct
YTAEV

SEQ ID NO: 5 - protein, 5 aa, synthetic construct
YPAEE

SEQ ID NO: 6 - protein, 5 aa, synthetic construct
YQAEV

SEQ ID NO: 7 - protein, 5 aa, synthetic construct
YTPSL

SEQ ID NO: 8 - protein, 5 aa, synthetic construct
YPAAV

SEQ ID NO: 9 - protein, 5 aa, synthetic construct
NPAEV

SEQ ID NO: 10 - protein, 5 aa, synthetic construct
CPAEV

SEQ ID NO: 11 - protein, 5 aa, synthetic construct
YQAEE

SEQ ID NO: 12 - protein, 5 aa, synthetic construct
TEAEV

SEQ ID NO: 13 - protein, 5 aa, synthetic construct
YPADV

SEQ ID NO: 14 - protein, 4 aa, synthetic construct
TNNS

SEQ ID NO: 15 - protein, 4 aa, synthetic construct
QAEV

SEQ ID NO: 16 - protein, 4 aa, synthetic construct
TAEV

SEQ ID NO: 17 - protein, 4 aa, synthetic construct
PAEV

SEQ ID NO: 18 - protein, 4 aa, synthetic construct
PAEE

SEQ ID NO: 19 - protein, 4 aa, synthetic construct
PADV

SEQ ID NO: 20 - protein, 7 aa, synthetic construct
PAEVVQK

SEQ ID NO: 21 - protein, 4 aa, synthetic construct
YPAE

SEQ ID NO: 22 - protein, 4 aa, synthetic construct
YPPS

SEQ ID NO: 23 - protein, 4 aa, synthetic construct
NKAE

SEQ ID NO: 24 - protein, 4 aa, synthetic construct
YTAE

SEQ ID NO: 25 - protein, 4 aa, synthetic construct
YQAE

SEQ ID NO: 26 - protein, 4 aa, synthetic construct
YTPS

SEQ ID NO: 27 - protein, 4 aa, synthetic construct
YPAA

SEQ ID NO: 28 - protein, 4 aa, synthetic construct
NPAE

SEQ ID NO: 29 - protein, 4 aa, synthetic construct
CPAE

SEQ ID NO: 30 - protein, 4 aa, synthetic construct
THAS

SEQ ID NO: 31 - protein, 4 aa, synthetic construct
PPSL

SEQ ID NO: 32 - protein, 4 aa, synthetic construct
KAEV

SEQ ID NO: 33 - protein, 4 aa, synthetic construct
TPSL

SEQ ID NO: 34 - protein, 4 aa, synthetic construct
PAAV

SEQ ID NO: 35 - protein, 4 aa, synthetic construct
QAEE

SEQ ID NO: 36 - protein, 6 aa, synthetic construct
AEVVQK

SEQ ID NO: 37 - protein, 6 aa, synthetic construct
PSLVQK

SEQ ID NO: 38 - protein, 6 aa, synthetic construct
AEVEQK

SEQ ID NO: 39 - protein, 6 aa, synthetic construct
AEEVQK

SEQ ID NO: 40 - protein, 6 aa, synthetic construct
PSLEQK

SEQ ID NO: 41 - protein, 6 aa, synthetic construct
PSLVKK

SEQ ID NO: 42 - protein, 6 aa, synthetic construct
AEVVKK

SEQ ID NO: 43 - protein, 6 aa, synthetic construct
AEVVHK

SEQ ID NO: 44 - protein, 6 aa, synthetic construct
AAVVQK

SEQ ID NO: 45 - protein, 6 aa, synthetic construct
AEVVQQ

SEQ ID NO: 46 - protein, 6 aa, synthetic construct
AEVLQK

SEQ ID NO: 47 - protein, 7 aa, synthetic construct
PPSLVQK

SEQ ID NO: 48 - protein, 7 aa, synthetic construct
KAEVVQK

SEQ ID NO: 49 - protein, 7 aa, synthetic construct
TAEVVQK

SEQ ID NO: 50 - protein, 7 aa, synthetic construct
PAEVEQK

SEQ ID NO: 51 - protein, 7 aa, synthetic construct
PAEEVQK

SEQ ID NO: 52 - protein, 7 aa, synthetic construct
QAEVVQK

SEQ ID NO: 53 - protein, 7 aa, synthetic construct
TPSLVQK

SEQ ID NO: 54 - protein, 7 aa, synthetic construct
PPSLEQK

SEQ ID NO: 55 - protein, 7 aa, synthetic construct
PPSLVKK

SEQ ID NO: 56 - protein, 7 aa, synthetic construct
PAEVVKK

SEQ ID NO: 57 - protein, 7 aa, synthetic construct
PAEVVHK

SEQ ID NO: 58 - protein, 7 aa, synthetic construct
PAAVVQK

SEQ ID NO: 59 - protein, 7 aa, synthetic construct
PAEVVQQ

SEQ ID NO: 60 - protein, 7 aa, synthetic construct
TAEVVKK

SEQ ID NO: 61 - protein, 7 aa, synthetic construct
PAEVLQK

SEQ ID NO: 62 - protein, 7 aa, synthetic construct
QAEEVQK

SEQ ID NO: 63 - protein, 5 aa, synthetic construct
SSYPA

SEQ ID NO: 64 - protein, 5 aa, synthetic construct
SKYPA

SEQ ID NO: 65 - protein, 5 aa, synthetic construct
SLYPA

SEQ ID NO: 66 - protein, 5 aa, synthetic construct
SRYPA

SEQ ID NO: 67 - protein, 5 aa, synthetic construct
SSYPP

SEQ ID NO: 68 - protein, 5 aa, synthetic construct
GAYPA

SEQ ID NO: 69 - protein, 5 aa, synthetic construct
GSYPA

SEQ ID NO: 70 - protein, 5 aa, synthetic construct
ASYPA

SEQ ID NO: 71 - protein, 5 aa, synthetic construct
STNKA

SEQ ID NO: 72 - protein, 5 aa, synthetic construct
SSYTA

SEQ ID NO: 73 - protein, 5 aa, synthetic construct
SSYQA

SEQ ID NO: 74 - protein, 5 aa, synthetic construct
SSYTP

SEQ ID NO: 75 - protein, 5 aa, synthetic construct
SSNPA

SEQ ID NO: 76 - protein, 5 aa, synthetic construct
SLCPA

SEQ ID NO: 77 - protein, 5 aa, synthetic construct
RSYTA

SEQ ID NO: 78 - protein, 5 aa, synthetic construct
SSTHA

SEQ ID NO: 79 - protein, 6 aa, synthetic construct
SSYPAE

SEQ ID NO: 80 - protein, 6 aa, synthetic construct
SKYPAE

SEQ ID NO: 81 - protein, 6 aa, synthetic construct
SLYPAE

SEQ ID NO: 82 - protein, 6 aa, synthetic construct
SRYPAE

SEQ ID NO: 83 - protein, 6 aa, synthetic construct
SSYPPS

SEQ ID NO: 84 - protein, 6 aa, synthetic construct
GAYPAE

SEQ ID NO: 85 - protein, 6 aa, synthetic construct
GSYPAE

SEQ ID NO: 86 - protein, 6 aa, synthetic construct
ASYPAE

SEQ ID NO: 87 - protein, 6 aa, synthetic construct
STNKAE

SEQ ID NO: 88 - protein, 6 aa, synthetic construct
SSYTAE

SEQ ID NO: 89 - protein, 6 aa, synthetic construct
SSYQAE

SEQ ID NO: 90 - protein, 6 aa, synthetic construct
SSYTPS

SEQ ID NO: 91 - protein, 6 aa, synthetic construct
SSYPAA

SEQ ID NO: 92 - protein, 6 aa, synthetic construct
SSNPAE

SEQ ID NO: 93 - protein, 6 aa, synthetic construct
SLCPAE

SEQ ID NO: 94 - protein, 6 aa, synthetic construct
RSYTAE

SEQ ID NO: 95 - protein, 6 aa, synthetic construct
SSTHAS

SEQ ID NO: 96 - protein, 8 aa, synthetic construct
QSSYPAEV

SEQ ID NO: 97 - protein, 8 aa, synthetic construct
QSKYPAEV

SEQ ID NO: 98 - protein, 8 aa, synthetic construct
TSLYPAEV

SEQ ID NO: 99 - protein, 8 aa, synthetic construct
SSSYPAEV

SEQ ID NO: 100 - protein, 8 aa, synthetic construct
QSRYPAEV

SEQ ID NO: 101 - protein, 8 aa, synthetic construct
QSSYPPSL

SEQ ID NO: 102 - protein, 8 aa, synthetic construct
AGAYPAEV

SEQ ID NO: 103 - protein, 8 aa, synthetic construct
IGSYPAEV

SEQ ID NO: 104 - protein, 8 aa, synthetic construct
QASYPAEV

SEQ ID NO: 105 - protein, 8 aa, synthetic construct
ASSYPAEV

SEQ ID NO: 106 - protein, 8 aa, synthetic construct
LGSYPAEV

SEQ ID NO: 107 - protein, 8 aa, synthetic construct
QSTNKAEV

SEQ ID NO: 108 - protein, 8 aa, synthetic construct
HSSYPAEV

SEQ ID NO: 109 - protein, 8 aa, synthetic construct
SSSYTAEV

SEQ ID NO: 110 - protein, 8 aa, synthetic construct
TSLYPAEE

SEQ ID NO: 111 - protein, 8 aa, synthetic construct
ASSYQAEV

SEQ ID NO: 112 - protein, 8 aa, synthetic construct
QSSYTPSL

SEQ ID NO: 113 - protein, 8 aa, synthetic construct
QSRYPAEE

SEQ ID NO: 114 - protein, 8 aa, synthetic construct
LSSYQAEV

SEQ ID NO: 115 - protein, 8 aa, synthetic construct
HSSYPAAV

SEQ ID NO: 116 - protein, 8 aa, synthetic construct
QSSNPAEV

SEQ ID NO: 117 - protein, 8 aa, synthetic construct
QSSYTAEV

SEQ ID NO: 118 - protein, 8 aa, synthetic construct
TSLCPAEV

SEQ ID NO: 119 - protein, 8 aa, synthetic construct
QRSYTAEV

SEQ ID NO: 120 - protein, 8 aa, synthetic construct
QSSYQAEE

SEQ ID NO: 121 - protein, 9 aa, synthetic construct
SSYPAEVVQ

SEQ ID NO: 122 - protein, 9 aa, synthetic construct
SKYPAEVVQ

SEQ ID NO: 123 - protein, 9 aa, synthetic construct
SLYPAEVVQ

SEQ ID NO: 124 - protein, 9 aa, synthetic construct
SRYPAEVVQ

SEQ ID NO: 125 - protein, 9 aa, synthetic construct
SSYPPSLVQ

SEQ ID NO: 126 - protein, 9 aa, synthetic construct
GAYPAEVVQ

SEQ ID NO: 127 - protein, 9 aa, synthetic construct
GSYPAEVVQ

SEQ ID NO: 128 - protein, 9 aa, synthetic construct
ASYPAEVVQ

SEQ ID NO: 129 - protein, 9 aa, synthetic construct
STNKAEVVQ

SEQ ID NO: 130 - protein, 9 aa, synthetic construct
SSYTAEVVQ

SEQ ID NO: 131 - protein, 9 aa, synthetic construct
SKYPAEVEQ

SEQ ID NO: 132 - protein, 9 aa, synthetic construct
SLYPAEEVQ

SEQ ID NO: 133 - protein, 9 aa, synthetic construct
SSYQAEVVQ

SEQ ID NO: 134 - protein, 9 aa, synthetic construct
SSYTPSLVQ

SEQ ID NO: 135 - protein, 9 aa, synthetic construct
SRYPAEEVQ

SEQ ID NO: 136 - protein, 9 aa, synthetic construct
SSYPPSLEQ

SEQ ID NO: 137 - DNA, 2175 bp, Adeno-associated virus 5
  source 1..2175: mol_type = genomic DNA
atgtcttttgttgatcaccctccagattggttggaagaagttggtgaaggtcttcgcgagtttttgggccttgaagcgggcccaccgaaaccaaaacccaatcagcagcatcaagatcaagcccgtggtcttgtgctgcctggttataactatctcggacccggaaacggtctcgatcgaggagagcctgtcaacagggcagacgaggtcgcgcgagagcacgacatctcgtacaacgagcagcttgaggcgggagacaacccctacctcaagtacaaccacgcggacgccgagtttcaggagaagctcgccgacgacacatccttcgggggaaacctcggaaaggcagtctttcaggccaagaaaagggttctcgaaccttttggcctggttgaagagggtgctaagacggcccctaccggaaagcggatagacgaccactttccaaaaagaaagaaggctcggaccgaagaggactccaagccttccacctcgtcagacgccgaagctggacccagcggatcccagcagctgcaaatcccagcccaaccagcctcaagtttgggagctgatacaatgtctgcgggaggtggcggcccattgggcgacaataaccaaggtgccgatggagtgggcaatgcctcgggagattggcattgcgattccacgtggatgggggacagagtcgtcaccaagtccacccgaacctgggtgctgcccagctacaacaaccaccagtaccgagagatcaaaagcggctccgtcgacggaagcaacgccaacgcctactttggatacagcaccccctgggggtactttgactttaaccgcttccacagccactggagcccccgagactggcaaagactcatcaacaactactggggcttcagaccccggtccctcagagtcaaaatcttcaacattcaagtcaaagaggtcacggtgcaggactccaccaccaccatcgccaacaacctcacctccaccgtccaagtgtttacggacgacgactaccagctgccctacgtcgtcggcaacgggaccgagggatgcctgccggccttccctccgcaggtctttacgctgccgcagtacggttacgcgacgctgaaccgcgacaacacagaaaatcccaccgagaggagcagcttcttctgcctagagtactttcccagcaagatgctgagaacgggcaacaactttgagtttacctacaactttgaggaggtgcccttccactccagcttcgctcccagtcagaacctgttcaagctggccaacccgctggtggaccagtacttgtaccgcttcgtgagcacaaataacactggcggagtccagttcaacaagaacctggccgggagatacgccaacacctacaaaaactggttcccggggcccatgggccgaacccagggctggaacctgggctccggggtcaaccgcgccagtgtcagcgccttcgccacgaccaataggatggagctcgagggcgcgagttaccaggtgcccccgcagccgaacggcatgaccaacaacctccagggcagcaacacctatgccctggagaacactatgatcttcaacagccagccggcgaacccgggcaccaccgccacgtacctcgagggcaacatgctcatcaccagcgagagcgagacgcagccggtgaaccgcgtggcgtacaacgtcggcgggcagatggccaccaacaaccagagctctactactgcccccgcgaccggcacgtacaacctccaggaaatcgtgcccggcagcgtgtggatggagagggacgtgtacctccaaggacccatctgggccaagatcccagagacgggggcgcactttcacccctctccggccatgggcggattcggactcaaacacccaccgcccatgatgctcatcaagaacacgcctgtgcccggaaatatcaccagcttctcggacgtgcccgtcagcagcttcatcacccagtacagcaccgggcaggtcaccgtggagatggagtgggagctcaagaaggaaaactccaagaggtggaacccagagatccagtacacaaacaactacaacgacccccagtttgtggactttgccccggacagcaccggggaatacagaaccaccagacctatcggaacccgataccttacccgacccctttaa

SEQ ID NO: 138 - protein, 724 aa, Adeno-associated virus 5
MSFVDHPPDWLEEVGEGLREFLGLEAGPPKPKPNQQHQDQARGLVLPGYNYLGPGNGLDRGEPVNRADEVAREHDISYNEQLEAGDNPYLKYNHADAEFQEKLADDTSFGGNLGKAVFQAKKRVLEPFGLVEEGAKTAPTGKRIDDHFPKRKKARTEEDSKPSTSSDAEAGPSGSQQLQIPAQPASSLGADTMSAGGGGPLGDNNQGADGVGNASGDWHCDSTWMGDRVVTKSTRTWVLPSYNNHQYREIKSGSVDGSNANAYFGYSTPWGYFDFNRFHSHWSPRDWQRLINNYWGFRPRSLRVKIFNIQVKEVTVQDSTTTIANNLTSTVQVFTDDDYQLPYVVGNGTEGCLPAFPPQVFTLPQYGYATLNRDNTENPTERSSFFCLEYFPSKMLRTGNNFEFTYNFEEVPFHSSFAPSQNLFKLANPLVDQYLYRFVSTNNTGGVQFNKNLAGRYANTYKNWFPGPMGRTQGWNLGSGVNRASVSAFATTNRMELEGASYQVPPQPNGMTNNLQGSNTYALENTMIFNSQPANPGTTATYLEGNMLITSESETQPVNRVAYNVGGQMATNNQSSTTAPATGTYNLQEIVPGSVWMERDVYLQGPIWAKIPETGAHFHPSPAMGGFGLKHPPPMMLIKNTPVPGNITSFSDVPVSSFITQYSTGQVTVEMEWELKKENSKRWNPEIQYTNNYNDPQFVDFAPDSTGEYRTTRPIGTRYLTRPL

SEQ ID NO: 139 - protein, 736 aa, synthetic construct
MAADGYLPDWLEDNLSEGIREWWALKPGAPQPKANQQHQDNARGLVLPGYKYLGPGNGLDKGEPVNAADAAALEHDKAYDQQLKAGDNPYLKYNHADAEFQERLKEDTSFGGNLGRAVFQAKKRLLEPLGLVEEAAKTAPGKKRPVEQSPQEPDSSAGIGKSGAQPAKKRLNFGQTGDTESVPDPQPIGEPPAAPSGVGSLTMASGGGAPVADNNEGADGVGSSSGNWHCDSQWLGDRVITTSTRTWALPTYNNHLYKQISNSTSGGSSNDNAYFGYSTPWGYFDFNRFHCHFSPRDWQRLINNNWGFRPKRLNFKLFNIQVKEVTDNNGVKTIANNLTSTVQVFTDSDYQLPYVLGSAHEGCLPPFPADVFMIPQYGYLTLNDGSQAVGRSSFYCLEYFPSQMLRTGNNFQFSYEFENVPFHSSYAHSQSLDRLMNPLIDQYLYYLSKTINGSGQNQQTLKFSVAGPSNMAVQGRNYIPGPSYRQQRVSTTVTQNNNSEFAWPGASSWALNGRNSLMNPGPAMASHKEGEDRFFPLSGSLIFGKQGTGRDNVDADKVMITNEEEIKTTNPVATESYGQVATNHQSAQAQAQTGWVQNQGILPGMVWQDRDVYLQGPIWAKIPHTDGNFHPSPLMGGFGMKHPPPQILIKNTPVPADPPTAFNKDKLNSFITQYSTGQVSVEIEWELQKENSKRWNPEIQYTSNYYKSNNVEFAVNTEGVYSEPRPIGTRYLTRNL

SEQ ID NO: 140 - protein, 9 aa, synthetic construct
SSYPPSLVK

SEQ ID NO: 141 - protein, 9 aa, synthetic construct
SSYPAEVVK

SEQ ID NO: 142 - protein, 9 aa, synthetic construct
SKYPAEVVH

SEQ ID NO: 143 - protein, 9 aa, synthetic construct
SSYPAAVVQ

SEQ ID NO: 144 - protein, 9 aa, synthetic construct
SSNPAEVVQ

SEQ ID NO: 145 - protein, 9 aa, synthetic construct
SLCPAEVVQ

SEQ ID NO: 146 - protein, 9 aa, synthetic construct
RSYTAEVVQ

SEQ ID NO: 147 - protein, 9 aa, synthetic construct
SSYTAEVVK

SEQ ID NO: 148 - protein, 9 aa, synthetic construct
SSYPAEVLQ

SEQ ID NO: 149 - protein, 9 aa, synthetic construct
SSYQAEEVQ

SEQ ID NO: 150 - protein, 11 aa, synthetic construct
QSSYPAEVVQK

SEQ ID NO: 151 - protein, 11 aa, synthetic construct
QSKYPAEVVQK

SEQ ID NO: 152 - protein, 11 aa, synthetic construct
TSLYPAEVVQK

SEQ ID NO: 153 - protein, 11 aa, synthetic construct
SSSYPAEVVQK

SEQ ID NO: 154 - protein, 11 aa, synthetic construct
QSRYPAEVVQK

SEQ ID NO: 155 - protein, 11 aa, synthetic construct
QSSYPPSLVQK

SEQ ID NO: 156 - protein, 11 aa, synthetic construct
AGAYPAEVVQK

SEQ ID NO: 157 - protein, 11 aa, synthetic construct
IGSYPAEVVQK

SEQ ID NO: 158 - protein, 11 aa, synthetic construct
QASYPAEVVQK

SEQ ID NO: 159 - protein, 11 aa, synthetic construct
ASSYPAEVVQK

SEQ ID NO: 160 - protein, 11 aa, synthetic construct
LGSYPAEVVQK

SEQ ID NO: 161 - protein, 11 aa, synthetic construct
QSTNKAEVVQK

SEQ ID NO: 162 - protein, 11 aa, synthetic construct
HSSYPAEVVQK

SEQ ID NO: 163 - protein, 11 aa, synthetic construct
SSSYTAEVVQK

SEQ ID NO: 164 - protein, 11 aa, synthetic construct
QSKYPAEVEQK

SEQ ID NO: 165 - protein, 11 aa, synthetic construct
TSLYPAEEVQK

SEQ ID NO: 166 - protein, 11 aa, synthetic construct
ASSYQAEVVQK

SEQ ID NO: 167 - protein, 11 aa, synthetic construct
QSSYTPSLVQK

SEQ ID NO: 168 - protein, 11 aa, synthetic construct
QSRYPAEEVQK

SEQ ID NO: 169 - protein, 11 aa, synthetic construct
QSSYPPSLEQK

SEQ ID NO: 170 - protein, 11 aa, synthetic construct
QSSYPPSLVKK

SEQ ID NO: 171 - protein, 11 aa, synthetic construct
LSSYQAEVVQK

SEQ ID NO: 172 - protein, 11 aa, synthetic construct
SSSYPAEVVKK

SEQ ID NO: 173 - protein, 11 aa, synthetic construct
QSKYPAEVVHK

SEQ ID NO: 174 - protein, 11 aa, synthetic construct
HSSYPAAVVQK

SEQ ID NO: 175 - protein, 11 aa, synthetic construct
QSSNPAEVVQK

SEQ ID NO: 176 - protein, 11 aa, synthetic construct
SSSYPAEVVQQ

SEQ ID NO: 177 - protein, 11 aa, synthetic construct
QSSYTAEVVQK

SEQ ID NO: 178 - protein, 11 aa, synthetic construct
TSLCPAEVVQK

SEQ ID NO: 179 - protein, 11 aa, synthetic construct
QRSYTAEVVQK

SEQ ID NO: 180 - protein, 11 aa, synthetic construct
QSSYTAEVVKK

SEQ ID NO: 181 - protein, 11 aa, synthetic construct
HSSYPAEVLQK

SEQ ID NO: 182 - protein, 11 aa, synthetic construct
QSSYQAEEVQK

SEQ ID NO: 183 - protein, 6 aa, synthetic construct
TNNQSS

SEQ ID NO: 184 - protein, 6 aa, synthetic construct
TNNQSK

SEQ ID NO: 185 - protein, 6 aa, synthetic construct
TNNTSL

SEQ ID NO: 186 - protein, 6 aa, synthetic construct
TNNSSS

SEQ ID NO: 187 - protein, 6 aa, synthetic construct
TNNQSR

SEQ ID NO: 188 - protein, 6 aa, synthetic construct
TNNAGA

SEQ ID NO: 189 - protein, 6 aa, synthetic construct
TNNIGS

SEQ ID NO: 190 - protein, 6 aa, synthetic construct
TNNQAS

SEQ ID NO: 191 - protein, 6 aa, synthetic construct
TNTASS

SEQ ID NO: 192 - protein, 6 aa, synthetic construct
TNNLGS

SEQ ID NO: 193 - protein, 6 aa, synthetic construct
TNNQST

SEQ ID NO: 194 - protein, 6 aa, synthetic construct
TNNHSS

SEQ ID NO: 195 - protein, 6 aa, synthetic construct
TNNLSS

SEQ ID NO: 196 - protein, 6 aa, synthetic construct
INNQSS

SEQ ID NO: 197 - protein, 6 aa, synthetic construct
TNSQSS

SEQ ID NO: 198 - protein, 6 aa, synthetic construct
NNNQSR

SEQ ID NO: 199 - protein, 6 aa, synthetic construct
TNSTSL

SEQ ID NO: 200 - protein, 6 aa, synthetic construct
TNNQRS

SEQ ID NO: 201 - protein, 6 aa, synthetic construct
TNKQAS

SEQ ID NO: 202 - protein, 8 aa, synthetic construct
RNQKVQGG

SEQ ID NO: 203 - protein, 8 aa, synthetic construct
PDNRVKPV

SEQ ID NO: 204 - protein, 8 aa, synthetic construct
ARVEVSAG

SEQ ID NO: 205 - protein, 8 aa, synthetic construct
MLKRVITI

SEQ ID NO: 206 - protein, 8 aa, synthetic construct
ESTHVELI

SEQ ID NO: 207 - protein, 8 aa, synthetic construct
GRVHVNMA

SEQ ID NO: 208 - protein, 8 aa, synthetic construct
TSQSSTKS

SEQ ID NO: 209 - protein, 8 aa, synthetic construct
AKQVVKPP

SEQ ID NO: 210 - protein, 8 aa, synthetic construct
STMDVNKR

SEQ ID NO: 211 - protein, 8 aa, synthetic construct
KKSQVANA

SEQ ID NO: 212 - protein, 8 aa, synthetic construct
TNAVSTKQ

SEQ ID NO: 213 - protein, 8 aa, synthetic construct
TLATHENM

SEQ ID NO: 214 - protein, 8 aa, synthetic construct
VKGKVSAG

SEQ ID NO: 215 - protein, 8 aa, synthetic construct
IRQKVPAS

SEQ ID NO: 216 - protein, 8 aa, synthetic construct
GRSEVLKG

SEQ ID NO: 217 - protein, 8 aa, synthetic construct
TPIKTAVR

SEQ ID NO: 218 - protein, 8 aa, synthetic construct
CKLQVDCQ

SEQ ID NO: 219 - protein, 8 aa, synthetic construct
TKLKPAGP

SEQ ID NO: 220 - protein, 8 aa, synthetic construct
NTMHVELR

SEQ ID NO: 221 - protein, 8 aa, synthetic construct
TKTKLSSP

SEQ ID NO: 222 - protein, 8 aa, synthetic construct
DNMKVLGG

SEQ ID NO: 223 - protein, 8 aa, synthetic construct
RLAKVTQP

SEQ ID NO: 224 - protein, 8 aa, synthetic construct
GSNMVASK

SEQ ID NO: 225 - protein, 8 aa, synthetic construct
TMAPTKNP

SEQ ID NO: 226 - protein, 8 aa, synthetic construct
TAQHTTLS

SEQ ID NO: 227 - protein, 8 aa, synthetic construct
TQPSGKTQ

SEQ ID NO: 228 - protein, 8 aa, synthetic construct
MNSKVSSV

SEQ ID NO: 229 - protein, 8 aa, synthetic construct
TEATVKSN

SEQ ID NO: 230 - protein, 8 aa, synthetic construct
TSEIQGAK

SEQ ID NO: 231 - protein, 8 aa, synthetic construct
LSSNVTKA

SEQ ID NO: 232 - protein, 8 aa, synthetic construct
TPLCGMAL

SEQ ID NO: 233 - protein, 8 aa, synthetic construct
NNTAVSNK

SEQ ID NO: 234 - protein, 8 aa, synthetic construct
NKNRVRDL

SEQ ID NO: 235 - protein, 8 aa, synthetic construct
TFQTANKV

SEQ ID NO: 236 - protein, 8 aa, synthetic construct
TTKQPKAL

SEQ ID NO: 237 - protein, 8 aa, synthetic construct
GSAEVKMR

SEQ ID NO: 238 - protein, 8 aa, synthetic construct
SLLQVKLE

SEQ ID NO: 239 - protein, 8 aa, synthetic construct
THAVSTKP

SEQ ID NO: 240 - protein, 8 aa, synthetic construct
DINSVRRG

SEQ ID NO: 241 - protein, 8 aa, synthetic construct
QSKTVPAK

SEQ ID NO: 242 - protein, 8 aa, synthetic construct
TGKPDKSY

SEQ ID NO: 243 - protein, 8 aa, synthetic construct
TKIPSTSR

SEQ ID NO: 244 - protein, 8 aa, synthetic construct
TPAATNPK

SEQ ID NO: 245 - protein, 8 aa, synthetic construct
TITKPPAP

SEQ ID NO: 246 - protein, 8 aa, synthetic construct
GRLIVTDG

SEQ ID NO: 247 - protein, 8 aa, synthetic construct
TPKKSTSV

SEQ ID NO: 248 - protein, 8 aa, synthetic construct
LRGQVKSN

SEQ ID NO: 249 - protein, 8 aa, synthetic construct
GLPDVIKQ

SEQ ID NO: 250 - protein, 8 aa, synthetic construct
TREQTSTA

SEQ ID NO: 251 - protein, 8 aa, synthetic construct
TRNGQPVN

SEQ ID NO: 252 - protein, 8 aa, synthetic construct
TRASLSIK

SEQ ID NO: 253 - protein, 8 aa, synthetic construct
SFSEVKNM

SEQ ID NO: 254 - protein, 8 aa, synthetic construct
TQSRSGGP

SEQ ID NO: 255 - protein, 8 aa, synthetic construct
TSTPAVSQ

SEQ ID NO: 256 - protein, 8 aa, synthetic construct
TASVPATS

SEQ ID NO: 257 - protein, 8 aa, synthetic construct
TLASHENK

SEQ ID NO: 258 - protein, 8 aa, synthetic construct
TQSSDHKV

SEQ ID NO: 259 - protein, 8 aa, synthetic construct
TLASQEHM

SEQ ID NO: 260 - protein, 8 aa, synthetic construct
TKGLPTQM

SEQ ID NO: 261 - protein, 8 aa, synthetic construct
SSVVVDKM

SEQ ID NO: 262 - protein, 8 aa, synthetic construct
TLDSHEHK

SEQ ID NO: 263 - protein, 8 aa, synthetic construct
TNQKVTGS

SEQ ID NO: 264 - protein, 8 aa, synthetic construct
TLKHSDLS

SEQ ID NO: 265 - protein, 8 aa, synthetic construct
TTSTVSSP

SEQ ID NO: 266 - protein, 8 aa, synthetic construct
TKASHEHM

SEQ ID NO: 267 - protein, 8 aa, synthetic construct
TKVSGTPD

SEQ ID NO: 268 - protein, 8 aa, synthetic construct
TSSITPNP

SEQ ID NO: 269 - protein, 8 aa, synthetic construct
AAETVKPN

SEQ ID NO: 270 - protein, 8 aa, synthetic construct
TNTQSKLS

SEQ ID NO: 271 - protein, 8 aa, synthetic construct
TPEATNHK

SEQ ID NO: 272 - protein, 8 aa, synthetic construct
TGGRNPGG

SEQ ID NO: 273 - protein, 8 aa, synthetic construct
TGGRVQGP

SEQ ID NO: 274 - protein, 8 aa, synthetic construct
KMSGVVGK

SEQ ID NO: 275 - protein, 8 aa, synthetic construct
KGGVVKTV

SEQ ID NO: 276 - protein, 8 aa, synthetic construct
TNGASSKL

SEQ ID NO: 277 - protein, 8 aa, synthetic construct
SSGDVKLW

SEQ ID NO: 278 - protein, 8 aa, synthetic construct
TSGTPNNF

SEQ ID NO: 279 - protein, 8 aa, synthetic construct
KRTTVSSP

SEQ ID NO: 280 - protein, 8 aa, synthetic construct
TLASNENM

SEQ ID NO: 281 - protein, 8 aa, synthetic construct
TKQKDLPR

SEQ ID NO: 282 - protein, 8 aa, synthetic construct
ATNVVSSK

SEQ ID NO: 283 - protein, 8 aa, synthetic construct
ALDAVSNK

SEQ ID NO: 284 - protein, 8 aa, synthetic construct
SSPNVSRN

SEQ ID NO: 285 - protein, 8 aa, synthetic construct
THAASNKS

SEQ ID NO: 286 - protein, 8 aa, synthetic construct
TSSSTKSI

SEQ ID NO: 287 - protein, 8 aa, synthetic construct
EGKLVGTQ

SEQ ID NO: 288 - protein, 8 aa, synthetic construct
PNKLVGSV

SEQ ID NO: 289 - protein, 8 aa, synthetic construct
THASLPKP

SEQ ID NO: 290 - protein, 8 aa, synthetic construct
TPGNSARS

SEQ ID NO: 291 - protein, 8 aa, synthetic construct
TAPKVGNM

SEQ ID NO: 292 - protein, 8 aa, synthetic construct
TRALVKPP

SEQ ID NO: 293 - protein, 8 aa, synthetic construct
GLEDVKGR

SEQ ID NO: 294 - protein, 8 aa, synthetic construct
QSEKVHMG

SEQ ID NO: 295 - protein, 8 aa, synthetic construct
PSPNVTKN

SEQ ID NO: 296 - protein, 8 aa, synthetic construct
THAQSTKP

SEQ ID NO: 297 - protein, 8 aa, synthetic construct
RPKTVSTF

SEQ ID NO: 298 - protein, 8 aa, synthetic construct
EPSEVHKM

SEQ ID NO: 299 - protein, 8 aa, synthetic construct
TNQKPTLQ

SEQ ID NO: 300 - protein, 8 aa, synthetic construct
KKPTVATI

SEQ ID NO: 301 - protein, 8 aa, synthetic construct
TATVQSNP

SEQ ID NO: 302 - protein, 8 aa, synthetic construct
YQSDVPNR

SEQ ID NO: 303 - protein, 8 aa, synthetic construct
NPTVVKSP

SEQ ID NO: 304 - protein, 8 aa, synthetic construct
TVGSESRP

SEQ ID NO: 305 - protein, 8 aa, synthetic construct
TSKSAAVR

SEQ ID NO: 306 - protein, 8 aa, synthetic construct
TLANHEHM

SEQ ID NO: 307 - protein, 8 aa, synthetic construct
TLASHENM

SEQ ID NO: 308 - protein, 8 aa, synthetic construct
RKPSVQTV

SEQ ID NO: 309 - protein, 8 aa, synthetic construct
TGRDVPKL

SEQ ID NO: 310 - protein, 8 aa, synthetic construct
SQSSVKTP

SEQ ID NO: 311 - protein, 8 aa, synthetic construct
ATSVVSQA

SEQ ID NO: 312 - protein, 8 aa, synthetic construct
TGTKVESY

SEQ ID NO: 313 - protein, 8 aa, synthetic construct
NSNRVGGN

SEQ ID NO: 314 - protein, 8 aa, synthetic construct
TMTRVGDG

SEQ ID NO: 315 - protein, 8 aa, synthetic construct
NNGNVSAK

SEQ ID NO: 316 - protein, 8 aa, synthetic construct
KLLKVGSS

SEQ ID NO: 317 - protein, 8 aa, synthetic construct
SQPKVSTA

SEQ ID NO: 318 - protein, 8 aa, synthetic construct
MNDKVLTN

SEQ ID NO: 319 - protein, 8 aa, synthetic construct
TANSVKSQ

SEQ ID NO: 320 - protein, 8 aa, synthetic construct
QGANVVKQ

SEQ ID NO: 321 - protein, 8 aa, synthetic construct
TSSVSKQP

SEQ ID NO: 322 - protein, 8 aa, synthetic construct
SQGNVAKA

SEQ ID NO: 323 - protein, 8 aa, synthetic construct
IYVAVPAA

SEQ ID NO: 324 - protein, 8 aa, synthetic construct
TTMSATSP

SEQ ID NO: 325 - protein, 8 aa, synthetic construct
TFTATSNP

SEQ ID NO: 326 - protein, 8 aa, synthetic construct
NCTVVQCR

SEQ ID NO: 327 - protein, 8 aa, synthetic construct
RSKSVNPM

SEQ ID NO: 328 - protein, 8 aa, synthetic construct
GQVDVPKL

SEQ ID NO: 329 - protein, 8 aa, synthetic construct
TLASHENI

SEQ ID NO: 330 - protein, 8 aa, synthetic construct
THNSVRDR

SEQ ID NO: 331 - protein, 8 aa, synthetic construct
GQSTVGQM

SEQ ID NO: 332 - protein, 8 aa, synthetic construct
RLVTVKSP

SEQ ID NO: 333 - protein, 8 aa, synthetic construct
THEVSTKQ

SEQ ID NO: 334 - protein, 8 aa, synthetic construct
TDKKQTTS

SEQ ID NO: 335 - protein, 8 aa, synthetic construct
TATPSQSK

SEQ ID NO: 336 - protein, 8 aa, synthetic construct
TKQMSDHG

SEQ ID NO: 337 - protein, 8 aa, synthetic construct
TLASNEHK

SEQ ID NO: 338 - protein, 8 aa, synthetic construct
NMSPVPKL

SEQ ID NO: 339 - protein, 8 aa, synthetic construct
TAVKSQMP

SEQ ID NO: 340 - protein, 8 aa, synthetic construct
SNGAVGKH

SEQ ID NO: 341 - protein, 8 aa, synthetic construct
SNSKVNTG

SEQ ID NO: 342 - protein, 8 aa, synthetic construct
KIKVVNTP

SEQ ID NO: 343 - protein, 8 aa, synthetic construct
LLETVATK

SEQ ID NO: 344 - protein, 8 aa, synthetic construct
DSAKVMPQ

SEQ ID NO: 345 - protein, 8 aa, synthetic construct
TTKEVLSG

SEQ ID NO: 346 - protein, 8 aa, synthetic construct
ISSNVARG

SEQ ID NO: 347 - protein, 8 aa, synthetic construct
TGSTQSDL

SEQ ID NO: 348 - protein, 8 aa, synthetic construct
IKSGVQQK

SEQ ID NO: 349 - protein, 8 aa, synthetic construct
TATATQSK

SEQ ID NO: 350 - protein, 8 aa, synthetic construct
DGSQVHNR

SEQ ID NO: 351 - protein, 8 aa, synthetic construct
TDRNTPKL

SEQ ID NO: 352 - protein, 8 aa, synthetic construct
TTSGSPQP

SEQ ID NO: 353 - protein, 8 aa, synthetic construct
THEVSTKP

SEQ ID NO: 354 - protein, 8 aa, synthetic construct
TSSSPSNP

SEQ ID NO: 355 - protein, 8 aa, synthetic construct
LVAPVKQV

SEQ ID NO: 356 - protein, 8 aa, synthetic construct
LELLVPKL

SEQ ID NO: 357 - protein, 8 aa, synthetic construct
TSASKVSH

SEQ ID NO: 358 - protein, 8 aa, synthetic construct
LNAGVSSP

SEQ ID NO: 359 - protein, 8 aa, synthetic construct
TVTNGGKG

SEQ ID NO: 360 - protein, 8 aa, synthetic construct
TLGKVSLE

SEQ ID NO: 361 - protein, 8 aa, synthetic construct
NQEAVVKP

SEQ ID NO: 362 - protein, 8 aa, synthetic construct
AAMTVQKV

SEQ ID NO: 363 - protein, 8 aa, synthetic construct
KPQDVSSR

SEQ ID NO: 364 - protein, 8 aa, synthetic construct
YESKVQHT

SEQ ID NO: 365 - protein, 8 aa, synthetic construct
NMRGVEVK

SEQ ID NO: 366 - protein, 8 aa, synthetic construct
TREKPSTA

SEQ ID NO: 367 - protein, 8 aa, synthetic construct
VERSVTSN

SEQ ID NO: 368 - protein, 8 aa, synthetic construct
VGDLVHTG

SEQ ID NO: 369 - protein, 8 aa, synthetic construct
KNDHVSLS

SEQ ID NO: 370 - protein, 8 aa, synthetic construct
SNEKVSMS

SEQ ID NO: 371 - protein, 8 aa, synthetic construct
TRRAQESP

SEQ ID NO: 372 - protein, 8 aa, synthetic construct
TTVKSDQS

SEQ ID NO: 373 - protein, 8 aa, synthetic construct
TNMASSGK

SEQ ID NO: 374 - protein, 8 aa, synthetic construct
PSSDVVSQ

SEQ ID NO: 375 - protein, 8 aa, synthetic construct
TLSSHENM

SEQ ID NO: 376 - protein, 8 aa, synthetic construct
TNPSMQSP

SEQ ID NO: 377 - protein, 8 aa, synthetic construct
GVSLVKTG

SEQ ID NO: 378 - protein, 8 aa, synthetic construct
TPRNGAQP

SEQ ID NO: 379 - protein, 8 aa, synthetic construct
TVSDKSMS

SEQ ID NO: 380 - protein, 8 aa, synthetic construct
EVKMVSNV

SEQ ID NO: 381 - protein, 8 aa, synthetic construct
VSAGVSKN

SEQ ID NO: 382 - protein, 8 aa, synthetic construct
LSKGVGHE

SEQ ID NO: 383 - protein, 8 aa, synthetic construct
TTLSAKDR

SEQ ID NO: 384 - protein, 8 aa, synthetic construct
TMASHEHK

SEQ ID NO: 385 - protein, 8 aa, synthetic construct
TKALTSGP

SEQ ID NO: 386 - protein, 8 aa, synthetic construct
RPQKVSSA

SEQ ID NO: 387 - protein, 8 aa, synthetic construct
TPQGVSSP

SEQ ID NO: 388 - protein, 8 aa, synthetic construct
TKGTTSSH

SEQ ID NO: 389 - protein, 8 aa, synthetic construct
TMTSVVSP

SEQ ID NO: 390 - protein, 8 aa, synthetic construct
TIGGMKGK

SEQ ID NO: 391 - protein, 8 aa, synthetic construct
TGKLPSGQ

SEQ ID NO: 392 - protein, 8 aa, synthetic construct
AQDAVSAR

SEQ ID NO: 393 - protein, 8 aa, synthetic construct
TKVPSVSP

SEQ ID NO: 394 - protein, 8 aa, synthetic construct
DKGTVERR

SEQ ID NO: 395 - protein, 8 aa, synthetic construct
SKLDVNQR

SEQ ID NO: 396 - protein, 8 aa, synthetic construct
VSGKVVHQ

SEQ ID NO: 397 - protein, 8 aa, synthetic construct
ASNKVGTL

SEQ ID NO: 398 - protein, 8 aa, synthetic construct
TKPPGQQL

SEQ ID NO: 399 - protein, 8 aa, synthetic construct
TLASQEHK

SEQ ID NO: 400 - protein, 8 aa, synthetic construct
SIGKVGVG

SEQ ID NO: 401 - protein, 8 aa, synthetic construct
TRGASNSP

SEQ ID NO: 402 - protein, 8 aa, synthetic construct
TNAVSTKP

SEQ ID NO: 403 - protein, 8 aa, synthetic construct
TVSSSPGT

SEQ ID NO: 404 - protein, 8 aa, synthetic construct
KAETVDTS

SEQ ID NO: 405 - protein, 8 aa, synthetic construct
TLAYHEHK

SEQ ID NO: 406 - protein, 8 aa, synthetic construct
THAVTTKQ

SEQ ID NO: 407 - protein, 8 aa, synthetic construct
TLATHEHK

SEQ ID NO: 408 - protein, 8 aa, synthetic construct
TSLNDARR

SEQ ID NO: 409 - protein, 8 aa, synthetic construct
TNVQSSGK

SEQ ID NO: 410 - protein, 8 aa, synthetic construct
APKPVMSG

SEQ ID NO: 411 - protein, 8 aa, synthetic construct
TSVSNPSK

SEQ ID NO: 412 - protein, 8 aa, synthetic construct
TTSQTSAP

SEQ ID NO: 413 - protein, 8 aa, synthetic construct
TRQPSVTR

SEQ ID NO: 414 - protein, 8 aa, synthetic construct
LGSNVSAR

SEQ ID NO: 415 - protein, 8 aa, synthetic construct
TNPGVSNS

SEQ ID NO: 416 - protein, 8 aa, synthetic construct
VLGSVSSN

SEQ ID NO: 417 - protein, 8 aa, synthetic construct
TLTSTGGN

SEQ ID NO: 418 - protein, 8 aa, synthetic construct
MIAKVRTE

SEQ ID NO: 419 - protein, 8 aa, synthetic construct
NGKQVSVH

SEQ ID NO: 420 - protein, 8 aa, synthetic construct
TLLKSDRS

SEQ ID NO: 421 - protein, 8 aa, synthetic construct
TAGQVSSS

SEQ ID NO: 422 - protein, 8 aa, synthetic construct
TTMLAGGP

SEQ ID NO: 423 - protein, 8 aa, synthetic construct
KPSKVGGV

SEQ ID NO: 424 - protein, 8 aa, synthetic construct
LSNNVRIK

SEQ ID NO: 425 - protein, 8 aa, synthetic construct
THAHVKLE

SEQ ID NO: 426 - protein, 8 aa, synthetic construct
VTKHVDLL

SEQ ID NO: 427 - protein, 8 aa, synthetic construct
SRAEVAQR

SEQ ID NO: 428 - protein, 8 aa, synthetic construct
SCTNVASC

SEQ ID NO: 429 - protein, 8 aa, synthetic construct
TNSRKENI

SEQ ID NO: 430 - protein, 8 aa, synthetic construct
QQVSVPGP

SEQ ID NO: 431 - protein, 8 aa, synthetic construct
TTDLTTVE

SEQ ID NO: 432 - protein, 8 aa, synthetic construct
NHVVVISG

SEQ ID NO: 433 - protein, 8 aa, synthetic construct
TLATQEHM

SEQ ID NO: 434 - protein, 8 aa, synthetic construct
TPRSKPSP

SEQ ID NO: 435 - protein, 8 aa, synthetic construct
TTRKPQTT

SEQ ID NO: 436 - protein, 8 aa, synthetic construct
TPTPPSAQ

SEQ ID NO: 437 - protein, 8 aa, synthetic construct
TQKPHPQG

SEQ ID NO: 438 - protein, 8 aa, synthetic construct
TQLSMKAN

SEQ ID NO: 439 - protein, 8 aa, synthetic construct
NKLGVVTK

SEQ ID NO: 440 - protein, 8 aa, synthetic construct
NQTDVPPR

SEQ ID NO: 441 - protein, 8 aa, synthetic construct
THAETTKP

SEQ ID NO: 442 - protein, 8 aa, synthetic construct
LAKTVNQT

SEQ ID NO: 443 - protein, 8 aa, synthetic construct
TRPGVSDR

SEQ ID NO: 444 - protein, 8 aa, synthetic construct
LMNRVTQY

SEQ ID NO: 445 - protein, 8 aa, synthetic construct
SRENVSRS

SEQ ID NO: 446 - protein, 8 aa, synthetic construct
THTTIKSP

SEQ ID NO: 447 - protein, 8 aa, synthetic construct
TSGTVGTK

SEQ ID NO: 448 - protein, 8 aa, synthetic construct
KRLNVESR

SEQ ID NO: 449 - protein, 8 aa, synthetic construct
TMAPPGKI

SEQ ID NO: 450 - protein, 8 aa, synthetic construct
TVHKASMQ

SEQ ID NO: 451 - protein, 8 aa, synthetic construct
TATASQTK

SEQ ID NO: 452 - protein, 8 aa, synthetic construct
SQVVVSEK

SEQ ID NO: 453 - protein, 8 aa, synthetic construct
GTATVTTR

SEQ ID NO: 454 - protein, 8 aa, synthetic construct
SGTTVDSM

SEQ ID NO: 455 - protein, 8 aa, synthetic construct
ASTVVLEK

SEQ ID NO: 456 - protein, 8 aa, synthetic construct
TASATQTK

SEQ ID NO: 457 - protein, 8 aa, synthetic construct
SVLAVNKS

SEQ ID NO: 458 - protein, 8 aa, synthetic construct
SANLVKND

SEQ ID NO: 459 - protein, 8 aa, synthetic construct
RDAQVPKL

SEQ ID NO: 460 - protein, 8 aa, synthetic construct
PQRAVQEV

SEQ ID NO: 461 - protein, 8 aa, synthetic construct
TGKSPDQN

SEQ ID NO: 462 - protein, 8 aa, synthetic construct
LSSNVSRA

SEQ ID NO: 463 - protein, 8 aa, synthetic construct
TAGTTVTP

SEQ ID NO: 464 - protein, 8 aa, synthetic construct
TGSSPTGS

SEQ ID NO: 465 - protein, 8 aa, synthetic construct
KRNEVISK

SEQ ID NO: 466 - protein, 8 aa, synthetic construct
TLASHEHK

SEQ ID NO: 467 - protein, 8 aa, synthetic construct
RSNKVRET

SEQ ID NO: 468 - protein, 8 aa, synthetic construct
TSEKIQVM

SEQ ID NO: 469 - protein, 8 aa, synthetic construct
PSNNVKAL

SEQ ID NO: 470 - protein, 8 aa, synthetic construct
TLATLSTV

SEQ ID NO: 471 - protein, 8 aa, synthetic construct
THLTPKGN

SEQ ID NO: 472 - protein, 8 aa, synthetic construct
TPASVKGT

SEQ ID NO: 473 - protein, 8 aa, synthetic construct
TPGTPSAG

SEQ ID NO: 474 - protein, 8 aa, synthetic construct
RKNTVVNS

SEQ ID NO: 475 - protein, 8 aa, synthetic construct
PQKSVSNL

SEQ ID NO: 476 - protein, 8 aa, synthetic construct
TRLSSSGS

SEQ ID NO: 477 - protein, 8 aa, synthetic construct
YANSVKAM

SEQ ID NO: 478 - protein, 8 aa, synthetic construct
SRENVSRQ

SEQ ID NO: 479 - protein, 8 aa, synthetic construct
QLNKVVIR

SEQ ID NO: 480 - protein, 8 aa, synthetic construct
TVKEKGMQ

SEQ ID NO: 481 - protein, 8 aa, synthetic construct
KLRQVNAI

SEQ ID NO: 482 - protein, 8 aa, synthetic construct
NASMVANK

SEQ ID NO: 483 - protein, 8 aa, synthetic construct
VMSNVTQR

SEQ ID NO: 484 - protein, 8 aa, synthetic construct
GSGSVSKA

SEQ ID NO: 485 - protein, 8 aa, synthetic construct
TAVKVDHS

SEQ ID NO: 486 - protein, 8 aa, synthetic construct
TSETPSTA

SEQ ID NO: 487 - protein, 8 aa, synthetic construct
STNTVRVN

SEQ ID NO: 488 - protein, 8 aa, synthetic construct
LSNQVSAR

SEQ ID NO: 489 - protein, 8 aa, synthetic construct
TTAPATGT

SEQ ID NO: 490 - protein, 8 aa, synthetic construct
TVLQKSTG

SEQ ID NO: 491 - protein, 8 aa, synthetic construct
SSSYVTVD

SEQ ID NO: 492 - protein, 8 aa, synthetic construct
TSVDKARV

SEQ ID NO: 493 - protein, 8 aa, synthetic construct
RRATVTTP

SEQ ID NO: 494 - protein, 8 aa, synthetic construct
TGGRTPGG

SEQ ID NO: 495 - protein, 8 aa, synthetic construct
TDKQASGN

SEQ ID NO: 496 - protein, 8 aa, synthetic construct
TSPLANKS

SEQ ID NO: 497 - protein, 8 aa, synthetic construct
EGLKVLVG

SEQ ID NO: 498 - protein, 8 aa, synthetic construct
AIEKVSVN

SEQ ID NO: 499 - protein, 8 aa, synthetic construct
YVSNVAKA

SEQ ID NO: 500 - protein, 14 aa, synthetic construct
TNNQSSYPAEVVQK

SEQ ID NO: 501 - protein, 8 aa, synthetic construct
RGKAVANN

SEQ ID NO: 502 - protein, 8 aa, synthetic construct
TKLNVTAS

SEQ ID NO: 503 - protein, 14 aa, synthetic construct
TNNQSKYPAEVVQK

SEQ ID NO: 504 - protein, 8 aa, synthetic construct
HLSNVSKV

SEQ ID NO: 505 - protein, 8 aa, synthetic construct
SGSKVPTL

SEQ ID NO: 506 - protein, 14 aa, synthetic construct
TNNTSLYPAEVVQK

SEQ ID NO: 507 - protein, 8 aa, synthetic construct
TRETPSTE

SEQ ID NO: 508 - protein, 14 aa, synthetic construct
TNNSSSYPAEVVQK

SEQ ID NO: 509 - protein, 8 aa, synthetic construct
LSNSVTPR

SEQ ID NO: 510 - protein, 14 aa, synthetic construct
TNNQSRYPAEVVQK

SEQ ID NO: 511 - protein, 8 aa, synthetic construct
TLGHSAKQ

SEQ ID NO: 512 - protein, 14 aa, synthetic construct
TNNQSSYPPSLVQK

SEQ ID NO: 513 - protein, 14 aa, synthetic construct
TNNAGAYPAEVVQK

SEQ ID NO: 514 - protein, 14 aa, synthetic construct
TNNIGSYPAEVVQK

SEQ ID NO: 515 - protein, 8 aa, synthetic construct
QQDSVPGQ

SEQ ID NO: 516 - protein, 8 aa, synthetic construct
TTAKPTVE

SEQ ID NO: 517 - protein, 14 aa, synthetic construct
TNNQASYPAEVVQK

SEQ ID NO: 518 - protein, 8 aa, synthetic construct
KSLDVSIS

SEQ ID NO: 519 - protein, 8 aa, synthetic construct
QDSTVSKQ

SEQ ID NO: 520 - protein, 14 aa, synthetic construct
TNTASSYPAEVVQK

SEQ ID NO: 521 - protein, 8 aa, synthetic construct
NHTTVGER

SEQ ID NO: 522 - protein, 8 aa, synthetic construct
DANSVKVV

SEQ ID NO: 523 - protein, 14 aa, synthetic construct
TNNLGSYPAEVVQK

SEQ ID NO: 524 - protein, 14 aa, synthetic construct
TNNQSTNKAEVVQK

SEQ ID NO: 525 - protein, 14 aa, synthetic construct
TNNHSSYPAEVVQK

SEQ ID NO: 526 - protein, 14 aa, synthetic construct
TNNSSSYTAEVVQK

SEQ ID NO: 527 - protein, 8 aa, synthetic construct
KAATVQEP

SEQ ID NO: 528 - protein, 8 aa, synthetic construct
IIAEVGKQ

SEQ ID NO: 529 - protein, 14 aa, synthetic construct
TNNQSKYPAEVEQK

SEQ ID NO: 530 - protein, 14 aa, synthetic construct
TNNTSLYPAEEVQK

SEQ ID NO: 531 - protein, 14 aa, synthetic construct
TNTASSYQAEVVQK

SEQ ID NO: 532 - protein, 8 aa, synthetic construct
MSNKVLRD

SEQ ID NO: 533 - protein, 14 aa, synthetic construct
TNNQSSYTPSLVQK

SEQ ID NO: 534 - protein, 14 aa, synthetic construct
TNNQSRYPAEEVQK

SEQ ID NO: 535 - protein, 14 aa, synthetic construct
TNNQSSYPPSLEQK

SEQ ID NO: 536 - protein, 14 aa, synthetic construct
TNNQSSYPPSLVKK

SEQ ID NO: 537 - protein, 8 aa, synthetic construct
AGNSVRVS

SEQ ID NO: 538 - protein, 8 aa, synthetic construct
TTPANSRV

SEQ ID NO: 539 - protein, 14 aa, synthetic construct
TNNLSSYQAEVVQK

SEQ ID NO: 540 - protein, 14 aa, synthetic construct
TNNSSSYPAEVVKK

SEQ ID NO: 541 - protein, 8 aa, synthetic construct
SANKVKPD

SEQ ID NO: 542 - protein, 14 aa, synthetic construct
TNNQSKYPAEVVHK

SEQ ID NO: 543 - protein, 14 aa, synthetic construct
INNQSSYPAEVVQK

SEQ ID NO: 544 - protein, 8 aa, synthetic construct
ADTRVSNP

SEQ ID NO: 545 - protein, 14 aa, synthetic construct
TNNHSSYPAAVVQK

SEQ ID NO: 546 - protein, 8 aa, synthetic construct
WSNSVSTR

SEQ ID NO: 547 - protein, 8 aa, synthetic construct
TVLAQSTP

SEQ ID NO: 548 - protein, 14 aa, synthetic construct
TNSQSSNPAEVVQK

SEQ ID NO: 549 - protein, 8 aa, synthetic construct
VNSKVISD

SEQ ID NO: 550 - protein, 8 aa, synthetic construct
RSTGVHSD

SEQ ID NO: 551 - protein, 14 aa, synthetic construct
TNNSSSYPAEVVQQ

SEQ ID NO: 552 - protein, 14 aa, synthetic construct
NNNQSRYPAEVVQK

SEQ ID NO: 553 - protein, 14 aa, synthetic construct
TNNQSSYTAEVVQK

SEQ ID NO: 554 - protein, 14 aa, synthetic construct
TNNTSLCPAEVVQK

SEQ ID NO: 555 - protein, 8 aa, synthetic construct
TLTKTTMG

SEQ ID NO: 556 - protein, 14 aa, synthetic construct
TNSTSLYPAEVVQK

SEQ ID NO: 557 - protein, 14 aa, synthetic construct
TNNQRSYTAEVVQK

SEQ ID NO: 558 - protein, 14 aa, synthetic construct
TNNQSSYTAEVVKK

SEQ ID NO: 559 - protein, 8 aa, synthetic construct
TSLQVSKI

SEQ ID NO: 560 - protein, 14 aa, synthetic construct
TNNHSSYPAEVLQK

SEQ ID NO: 561 - protein, 8 aa, synthetic construct
TSNRTTLQ

SEQ ID NO: 562 - protein, 14 aa, synthetic construct
TNNQSSYQAEEVQK

SEQ ID NO: 563 - protein, 14 aa, synthetic construct
TNKQASYPAEVVQK

SEQ ID NO: 564 - protein, 5 aa, synthetic construct
VQKTA

SEQ ID NO: 565 - protein, 5 aa, synthetic construct
EQKTA

SEQ ID NO: 566 - protein, 5 aa, synthetic construct
VKKTA

SEQ ID NO: 567 - protein, 5 aa, synthetic construct
VQKPA

SEQ ID NO: 568 - protein, 5 aa, synthetic construct
VHKTA

SEQ ID NO: 569 - protein, 5 aa, synthetic construct
VQQTA

SEQ ID NO: 570 - protein, 5 aa, synthetic construct
VQKNA

SEQ ID NO: 571 - protein, 5 aa, synthetic construct
LQKTA

SEQ ID NO: 572 - protein, 10 aa, synthetic construct
SSYPAEVVQK

SEQ ID NO: 573 - protein, 10 aa, synthetic construct
SKYPAEVVQK

SEQ ID NO: 574 - protein, 10 aa, synthetic construct
SLYPAEVVQK

SEQ ID NO: 575 - protein, 10 aa, synthetic construct
SRYPAEVVQK

SEQ ID NO: 576 - protein, 10 aa, synthetic construct
GAYPAEVVQK

SEQ ID NO: 577 - protein, 8 aa, synthetic construct
PLKNVPPG

SEQ ID NO: 578 - protein, 8 aa, synthetic construct
TAVVVNSV

SEQ ID NO: 579 - protein, 8 aa, synthetic construct
KAVSVDTS

SEQ ID NO: 580 - protein, 10 aa, synthetic construct
GSYPAEVVQK

SEQ ID NO: 581 - protein, 8 aa, synthetic construct
VNNRVHQS

SEQ ID NO: 582 - protein, 10 aa, synthetic construct
ASYPAEVVQK

SEQ ID NO: 583 - protein, 8 aa, synthetic construct
GGGKVTDT

SEQ ID NO: 584 - protein, 10 aa, synthetic construct
YPAEVVQKTA

SEQ ID NO: 585 - protein, 8 aa, synthetic construct
SKLVVSDR

SEQ ID NO: 586 - protein, 10 aa, synthetic construct
YPAEVVQKPA

SEQ ID NO: 587 - protein, 4 aa, synthetic construct
TEAE

SEQ ID NO: 588 - protein, 4 aa, synthetic construct
YPAD

SEQ ID NO: 589 - protein, 8 aa, synthetic construct
NSPNVSRQ

SEQ ID NO: 590 - protein, 4 aa, synthetic construct
EAEV

SEQ ID NO: 591 - protein, 6 aa, synthetic construct
AEVVQN

SEQ ID NO: 592 - protein, 8 aa, synthetic construct
TVQNSAST

SEQ ID NO: 593 - protein, 6 aa, synthetic construct
ADVVQK

SEQ ID NO: 594 - protein, 7 aa, synthetic construct
PAEVVQN

SEQ ID NO: 595 - protein, 7 aa, synthetic construct
EAEVVQK

SEQ ID NO: 596 - protein, 7 aa, synthetic construct
PADVVQK

SEQ ID NO: 597 - protein, 5 aa, synthetic construct
LSYQA

SEQ ID NO: 598 - protein, 5 aa, synthetic construct
LSYTA

SEQ ID NO: 599 - protein, 8 aa, synthetic construct
HTNSVRTP

SEQ ID NO: 600 - protein, 5 aa, synthetic construct
LYYPA

SEQ ID NO: 601 - protein, 5 aa, synthetic construct
ATYPA

SEQ ID NO: 602 - protein, 8 aa, synthetic construct
DVASVSSK

SEQ ID NO: 603 - protein, 5 aa, synthetic construct
LSYPA

SEQ ID NO: 604 - protein, 8 aa, synthetic construct
PFQAVLGS

SEQ ID NO: 605 - protein, 5 aa, synthetic construct
TSTEA

SEQ ID NO: 606 - protein, 8 aa, synthetic construct
IGPSVGTD

SEQ ID NO: 607 - protein, 6 aa, synthetic construct
LSYQAE

SEQ ID NO: 608 - protein, 8 aa, synthetic construct
EAMMVDRK

SEQ ID NO: 609 - protein, 8 aa, synthetic construct
QRNLVKSA

SEQ ID NO: 610 - protein, 6 aa, synthetic construct
LSYTAE

SEQ ID NO: 611 - protein, 6 aa, synthetic construct
LYYPAE

SEQ ID NO: 612 - protein, 8 aa, synthetic construct
TSNSVRLG

SEQ ID NO: 613 - protein, 6 aa, synthetic construct
ATYPAE

SEQ ID NO: 614 - protein, 8 aa, synthetic construct
TPTPKNSH

SEQ ID NO: 615 - protein, 8 aa, synthetic construct
KMAGVARE

SEQ ID NO: 616 - protein, 6 aa, synthetic construct
LSYPAE

SEQ ID NO: 617 - protein, 8 aa, synthetic construct
AKDAVSGL

SEQ ID NO: 618 - protein, 8 aa, synthetic construct
ATLSVSTN

SEQ ID NO: 619 - protein, 6 aa, synthetic construct
TSTEAE

SEQ ID NO: 620 - protein, 8 aa, synthetic construct
TLPTPRQH

SEQ ID NO: 621 - protein, 6 aa, synthetic construct
LSYPAD

SEQ ID NO: 622 - protein, 8 aa, synthetic construct
SLSYQAEV

SEQ ID NO: 623 - protein, 8 aa, synthetic construct
SLSYTAEV

SEQ ID NO: 624 - protein, 8 aa, synthetic construct
SLYYPAEV

SEQ ID NO: 625 - protein, 8 aa, synthetic construct
SATYPAEV

SEQ ID NO: 626 - protein, 8 aa, synthetic construct
LRANVSSS

SEQ ID NO: 627 - protein, 8 aa, synthetic construct
TATSSHQQ

SEQ ID NO: 628 - protein, 8 aa, synthetic construct
GSNDVRNT

SEQ ID NO: 629 - protein, 8 aa, synthetic construct
SLSYPAEV

SEQ ID NO: 630 - protein, 8 aa, synthetic construct
SLKSVSLD

SEQ ID NO: 631 - protein, 8 aa, synthetic construct
TKTLQTSP

SEQ ID NO: 632 - protein, 8 aa, synthetic construct
SLSYPAEE

SEQ ID NO: 633 - protein, 8 aa, synthetic construct
QTSTEAEV

SEQ ID NO: 634 - protein, 8 aa, synthetic construct
SLSYPADV

SEQ ID NO: 635 - protein, 11 aa, synthetic construct
SLSYQAEVVQK

SEQ ID NO: 636 - protein, 8 aa, synthetic construct
TGLSVSTN

SEQ ID NO: 637 - protein, 11 aa, synthetic construct
SLSYTAEVVQK

SEQ ID NO: 638 - protein, 8 aa, synthetic construct
RAQTVSVK

SEQ ID NO: 639 - protein, 11 aa, synthetic construct
SLYYPAEVVQK

SEQ ID NO: 640 - protein, 8 aa, synthetic construct
VLSEVKLQ

SEQ ID NO: 641 - protein, 11 aa, synthetic construct
SATYPAEVVQK

SEQ ID NO: 642 - protein, 11 aa, synthetic construct
SLSYPAEVVQK

SEQ ID NO: 643 - protein, 11 aa, synthetic construct
SLSYPAEEVQK

SEQ ID NO: 644 - protein, 11 aa, synthetic construct
SLSYPAEVVQN

SEQ ID NO: 645 - protein, 11 aa, synthetic construct
QTSTEAEVVQK

SEQ ID NO: 646 - protein, 11 aa, synthetic construct
SLSYPADVVQK

SEQ ID NO: 647 - protein, 6 aa, synthetic construct
TNSSLS

SEQ ID NO: 648 - protein, 6 aa, synthetic construct
TNSSLY

SEQ ID NO: 649 - protein, 6 aa, synthetic construct
TNTSAT

SEQ ID NO: 650 - protein, 6 aa, synthetic construct
TNNQTS

SEQ ID NO: 651 - protein, 6 aa, synthetic construct
TNKSAT

SEQ ID NO: 652 - protein, 14 aa, synthetic construct
TNSSLSYQAEVVQK

SEQ ID NO: 653 - protein, 8 aa, synthetic construct
KSRNVPTL

SEQ ID NO: 654 - protein, 14 aa, synthetic construct
TNSSLSYTAEVVQK

SEQ ID NO: 655 - protein, 14 aa, synthetic construct
TNSSLYYPAEVVQK

SEQ ID NO: 656 - protein, 14 aa, synthetic construct
TNTSATYPAEVVQK

SEQ ID NO: 657 - protein, 14 aa, synthetic construct
TNSSLSYPAEVVQK

SEQ ID NO: 658 - protein, 14 aa, synthetic construct
TNSSLSYPAEEVQK

SEQ ID NO: 659 - protein, 8 aa, synthetic construct
TYAKDTSM

SEQ ID NO: 660 - protein, 14 aa, synthetic construct
TNSSLSYPAEVVQN

SEQ ID NO: 661 - protein, 8 aa, synthetic construct
TMASQEHM

SEQ ID NO: 662 - protein, 14 aa, synthetic construct
TNNQTSTEAEVVQK

SEQ ID NO: 663 - protein, 14 aa, synthetic construct
TNKSATYPAEVVQK

SEQ ID NO: 664 - protein, 8 aa, synthetic construct
SDNLVKHD

SEQ ID NO: 665 - protein, 14 aa, synthetic construct
TNSSLSYPADVVQK

SEQ ID NO: 666 - protein, 8 aa, synthetic construct
TMLNSAQQ

SEQ ID NO: 667 - protein, 7 aa, synthetic construct
LSYQAEV

SEQ ID NO: 668 - protein, 7 aa, synthetic construct
LSYTAEV

SEQ ID NO: 669 - protein, 7 aa, synthetic construct
LYYPAEV

SEQ ID NO: 670 - protein, 8 aa, synthetic construct
ILSNVSSR

SEQ ID NO: 671 - protein, 7 aa, synthetic construct
LSYPAEV

SEQ ID NO: 672 - protein, 8 aa, synthetic construct
YSNNVVKS

SEQ ID NO: 673 - protein, 7 aa, synthetic construct
LSYPAEE

SEQ ID NO: 674 - protein, 7 aa, synthetic construct
LSYPADV

SEQ ID NO: 675 - protein, 8 aa, synthetic construct
SANMVKHD

SEQ ID NO: 676 - protein, 7 aa, synthetic construct
TNSSLSY

SEQ ID NO: 677 - protein, 8 aa, synthetic construct
VSGNVSRS

SEQ ID NO: 678 - protein, 7 aa, synthetic construct
TNSSLYY

SEQ ID NO: 679 - protein, 9 aa, synthetic construct
TNSSLSYQA

SEQ ID NO: 680 - protein, 8 aa, synthetic construct
LHNKVNDV

SEQ ID NO: 681 - protein, 9 aa, synthetic construct
TNSSLSYTA

SEQ ID NO: 682 - protein, 9 aa, synthetic construct
TNSSLYYPA

SEQ ID NO: 683 - protein, 9 aa, synthetic construct
TNSSLSYPA

SEQ ID NO: 684 - protein, 10 aa, synthetic construct
TNSSLSYQAE

SEQ ID NO: 685 - protein, 10 aa, synthetic construct
TNSSLSYTAE

SEQ ID NO: 686 - protein, 10 aa, synthetic construct
TNSSLYYPAE

SEQ ID NO: 687 - protein, 10 aa, synthetic construct
TNSSLSYPAE

SEQ ID NO: 688 - protein, 8 aa, synthetic construct
TPMSTSDL

SEQ ID NO: 689 - protein, 10 aa, synthetic construct
TNSSLSYPAD

SEQ ID NO: 690 - protein, 8 aa, synthetic construct
SQRGVSNP

SEQ ID NO: 691 - protein, 8 aa, synthetic construct
TNANQVTR

SEQ ID NO: 692 - protein, 11 aa, synthetic construct
TNSSLSYQAEV

SEQ ID NO: 693 - protein, 11 aa, synthetic construct
TNSSLSYTAEV

SEQ ID NO: 694 - protein, 8 aa, synthetic construct
TERASSSL

SEQ ID NO: 695 - protein, 8 aa, synthetic construct
HYSKVADP

SEQ ID NO: 696 - protein, 11 aa, synthetic construct
TNSSLYYPAEV

SEQ ID NO: 697 - protein, 11 aa, synthetic construct
TNSSLSYPAEV

SEQ ID NO: 698 - protein, 11 aa, synthetic construct
TNSSLSYPAEE

SEQ ID NO: 699 - protein, 11 aa, synthetic construct
TNSSLSYPADV

SEQ ID NO: 700 - protein, 10 aa, synthetic construct
LSYQAEVVQK

SEQ ID NO: 701 - protein, 10 aa, synthetic construct
LSYTAEVVQK

SEQ ID NO: 702 - protein, 10 aa, synthetic construct
LYYPAEVVQK

SEQ ID NO: 703 - protein, 10 aa, synthetic construct
LSYPAEVVQK

SEQ ID NO: 704 - protein, 10 aa, synthetic construct
LSYPAEEVQK

SEQ ID NO: 705 - protein, 8 aa, synthetic construct
TNGATLGS

SEQ ID NO: 706 - protein, 10 aa, synthetic construct
LSYPAEVVQN

SEQ ID NO: 707 - protein, 8 aa, synthetic construct
TMNPSRNP

SEQ ID NO: 708 - protein, 10 aa, synthetic construct
LSYPADVVQK

SEQ ID NO: 709 - protein, 8 aa, synthetic construct
TVSSPSGG

SEQ ID NO: 710 - protein, 8 aa, synthetic construct
STLDVARR

SEQ ID NO: 711 - protein, 8 aa, synthetic construct
TPEETNPK

SEQ ID NO: 712 - protein, 8 aa, synthetic construct
GHRVVNNE

SEQ ID NO: 713 - protein, 8 aa, synthetic construct
TTAMHTVE

SEQ ID NO: 714 - protein, 5 aa, synthetic construct
VQKTD

SEQ ID NO: 715 - protein, 5 aa, synthetic construct
VQNTA

SEQ ID NO: 716 - protein, 8 aa, synthetic construct
PLVGVGSP

SEQ ID NO: 717 - protein, 8 aa, synthetic construct
FLNAVRGN

SEQ ID NO: 718 - protein, 10 aa, synthetic construct
ATYPAEVVQK

SEQ ID NO: 719 - protein, 10 aa, synthetic construct
YPAEVVQKTD

SEQ ID NO: 720 - protein, 8 aa, synthetic construct
LPSQVVKT

SEQ ID NO: 721 - protein, 8 aa, synthetic construct
LSTKVSDQ

SEQ ID NO: 722 - protein, 8 aa, synthetic construct
LGNRVSAL

SEQ ID NO: 723 - protein, 8 aa, synthetic construct
ANLKVIVK

SEQ ID NO: 724 - protein, 10 aa, synthetic construct
YPAEVVQKNA

SEQ ID NO: 725 - protein, 6 aa, synthetic construct
YPAEVV

SEQ ID NO: 726 - protein, 7 aa, synthetic construct
YPAEVVQ

SEQ ID NO: 727 - protein, 6 aa, synthetic construct
YTPSLV

SEQ ID NO: 728 - protein, 7 aa, synthetic construct
YTPSLVQ

SEQ ID NO: 729 - protein, 6 aa, synthetic construct
YPPSLV

SEQ ID NO: 730 - protein, 8 aa, synthetic construct
GGNLVRSV

SEQ ID NO: 731 - protein, 8 aa, synthetic construct
TSTRSSGN

SEQ ID NO: 732 - protein, 7 aa, synthetic construct
YPPSLVQ

SEQ ID NO: 733 - protein, 6 aa, synthetic construct
YPPSLE

SEQ ID NO: 734 - protein, 7 aa, synthetic construct
YPPSLEQ

SEQ ID NO: 735 - protein, 7 aa, synthetic construct
YPPSLVK

SEQ ID NO: 736 - protein, 22 aa, synthetic construct
TNNQSSTTAPATGTYNLQEIVP

SEQ ID NO: 737 - protein, 15 aa, synthetic construct
TNNQSSYPAEVVQKT

SEQ ID NO: 738 - protein, 595 aa, synthetic construct
TAPTGKRIDDHFPKRKKARTEEDSKPSTSSDAEAGPSGSQQLQIPAQPASSLGADTMSAGGGGPLGDNNQGADGVGNASGDWHCDSTWMGDRVVTKSTRTWVLPSYNNHQYREIKSGSVDGSNANAYFGYSTPWGYFDFNRFHSHWSPRDWQRLINNYWGFRPRSLRVKIFNIQVKEVTVQDSTTTIANNLTSTVQVFTDDDYQLPYVVGNGTEGCLPAFPPQVFTLPQYGYATLNRDNTENPTERSSFFCLEYFPSKMLRTGNNFEFTYNFEEVPFHSSFAPSQNLFKLANPLVDQYLYRFVSTNNTGGVQFNKNLAGRYANTYKNWFPGPMGRTQGWNLGSGVNRASVSAFATTNRMELEGASYQVPPQPNGMTNNLQGSNTYALENTMIFNSQPANPGTTATYLEGNMLITSESETQPVNRVAYNVGGQMATNNQSSYPAEVVQKTAPATGTYNLQEIVPGSVWMERDVYLQGPIWAKIPETGAHFHPSPAMGGFGLKHPPPMMLIKNTPVPGNITSFSDVPVSSFITQYSTGQVTVEMEWELKKENSKRWNPEIQYTNNYNDPQFVDFAPDSTGEYRTTRPIGTRYLTRPL

SEQ ID NO: 739 - protein, 539 aa, synthetic construct
MSAGGGGPLGDNNQGADGVGNASGDWHCDSTWMGDRVVTKSTRTWVLPSYNNHQYREIKSGSVDGSNANAYFGYSTPWGYFDFNRFHSHWSPRDWQRLINNYWGFRPRSLRVKIFNIQVKEVTVQDSTTTIANNLTSTVQVFTDDDYQLPYVVGNGTEGCLPAFPPQVFTLPQYGYATLNRDNTENPTERSSFFCLEYFPSKMLRTGNNFEFTYNFEEVPFHSSFAPSQNLFKLANPLVDQYLYRFVSTNNTGGVQFNKNLAGRYANTYKNWFPGPMGRTQGWNLGSGVNRASVSAFATTNRMELEGASYQVPPQPNGMTNNLQGSNTYALENTMIFNSQPANPGTTATYLEGNMLITSESETQPVNRVAYNVGGQMATNNQSSYPAEVVQKTAPATGTYNLQEIVPGSVWMERDVYLQGPIWAKIPETGAHFHPSPAMGGFGLKHPPPMMLIKNTPVPGNITSFSDVPVSSFITQYSTGQVTVEMEWELKKENSKRWNPEIQYTNNYNDPQFVDFAPDSTGEYRTTRPIGTRYLTRPL

SEQ ID NO: 740 - protein, 731 aa, synthetic construct
MSFVDHPPDWLEEVGEGLREFLGLEAGPPKPKPNQQHQDQARGLVLPGYNYLGPGNGLDRGEPVNRADEVAREHDISYNEQLEAGDNPYLKYNHADAEFQEKLADDTSFGGNLGKAVFQAKKRVLEPFGLVEEGAKTAPTGKRIDDHFPKRKKARTEEDSKPSTSSDAEAGPSGSQQLQIPAQPASSLGADTMSAGGGGPLGDNNQGADGVGNASGDWHCDSTWMGDRVVTKSTRTWVLPSYNNHQYREIKSGSVDGSNANAYFGYSTPWGYFDFNRFHSHWSPRDWQRLINNYWGFRPRSLRVKIFNIQVKEVTVQDSTTTIANNLTSTVQVFTDDDYQLPYVVGNGTEGCLPAFPPQVFTLPQYGYATLNRDNTENPTERSSFFCLEYFPSKMLRTGNNFEFTYNFEEVPFHSSFAPSQNLFKLANPLVDQYLYRFVSTNNTGGVQFNKNLAGRYANTYKNWFPGPMGRTQGWNLGSGVNRASVSAFATTNRMELEGASYQVPPQPNGMTNNLQGSNTYALENTMIFNSQPANPGTTATYLEGNMLITSESETQPVNRVAYNVGGQMATNNAGAYPAEVVQKTAPATGTYNLQEIVPGSVWMERDVYLQGPIWAKIPETGAHFHPSPAMGGFGLKHPPPMMLIKNTPVPGNITSFSDVPVSSFITQYSTGQVTVEMEWELKKENSKRWNPEIQYTNNYNDPQFVDFAPDSTGEYRTTRPIGTRYLTRPL

SEQ ID NO: 741 - protein, 731 aa, synthetic construct
MSFVDHPPDWLEEVGEGLREFLGLEAGPPKPKPNQQHQDQARGLVLPGYNYLGPGNGLDRGEPVNRADEVAREHDISYNEQLEAGDNPYLKYNHADAEFQEKLADDTSFGGNLGKAVFQAKKRVLEPFGLVEEGAKTAPTGKRIDDHFPKRKKARTEEDSKPSTSSDAEAGPSGSQQLQIPAQPASSLGADTMSAGGGGPLGDNNQGADGVGNASGDWHCDSTWMGDRVVTKSTRTWVLPSYNNHQYREIKSGSVDGSNANAYFGYSTPWGYFDFNRFHSHWSPRDWQRLINNYWGFRPRSLRVKIFNIQVKEVTVQDSTTTIANNLTSTVQVFTDDDYQLPYVVGNGTEGCLPAFPPQVFTLPQYGYATLNRDNTENPTERSSFFCLEYFPSKMLRTGNNFEFTYNFEEVPFHSSFAPSQNLFKLANPLVDQYLYRFVSTNNTGGVQFNKNLAGRYANTYKNWFPGPMGRTQGWNLGSGVNRASVSAFATTNRMELEGASYQVPPQPNGMTNNLQGSNTYALENTMIFNSQPANPGTTATYLEGNMLITSESETQPVNRVAYNVGGQMATNSTHSYPAEVVQKTAPATGTYNLQEIVPGSVWMERDVYLQGPIWAKIPETGAHFHPSPAMGGFGLKHPPPMMLIKNTPVPGNITSFSDVPVSSFITQYSTGQVTVEMEWELKKENSKRWNPEIQYTNNYNDPQFVDFAPDSTGEYRTTRPIGTRYLTRPL

SEQ ID NO: 742 - protein, 731 aa, synthetic construct
MSFVDHPPDWLEEVGEGLREFLGLEAGPPKPKPNQQHQDQARGLVLPGYNYLGPGNGLDRGEPVNRADEVAREHDISYNEQLEAGDNPYLKYNHADAEFQEKLADDTSFGGNLGKAVFQAKKRVLEPFGLVEEGAKTAPTGKRIDDHFPKRKKARTEEDSKPSTSSDAEAGPSGSQQLQIPAQPASSLGADTMSAGGGGPLGDNNQGADGVGNASGDWHCDSTWMGDRVVTKSTRTWVLPSYNNHQYREIKSGSVDGSNANAYFGYSTPWGYFDFNRFHSHWSPRDWQRLINNYWGFRPRSLRVKIFNIQVKEVTVQDSTTTIANNLTSTVQVFTDDDYQLPYVVGNGTEGCLPAFPPQVFTLPQYGYATLNRDNTENPTERSSFFCLEYFPSKMLRTGNNFEFTYNFEEVPFHSSFAPSQNLFKLANPLVDQYLYRFVSTNNTGGVQFNKNLAGRYANTYKNWFPGPMGRTQGWNLGSGVNRASVSAFATTNRMELEGASYQVPPQPNGMTNNLQGSNTYALENTMIFNSQPANPGTTATYLEGNMLITSESETQPVNRVAYNVGGQMATNNIGSYPAEVVQKTAPATGTYNLQEIVPGSVWMERDVYLQGPIWAKIPETGAHFHPSPAMGGFGLKHPPPMMLIKNTPVPGNITSFSDVPVSSFITQYSTGQVTVEMEWELKKENSKRWNPEIQYTNNYNDPQFVDFAPDSTGEYRTTRPIGTRYLTRPL

SEQ ID NO: 743 - protein, 731 aa, synthetic construct
MSFVDHPPDWLEEVGEGLREFLGLEAGPPKPKPNQQHQDQARGLVLPGYNYLGPGNGLDRGEPVNRADEVAREHDISYNEQLEAGDNPYLKYNHADAEFQEKLADDTSFGGNLGKAVFQAKKRVLEPFGLVEEGAKTAPTGKRIDDHFPKRKKARTEEDSKPSTSSDAEAGPSGSQQLQIPAQPASSLGADTMSAGGGGPLGDNNQGADGVGNASGDWHCDSTWMGDRVVTKSTRTWVLPSYNNHQYREIKSGSVDGSNANAYFGYSTPWGYFDFNRFHSHWSPRDWQRLINNYWGFRPRSLRVKIFNIQVKEVTVQDSTTTIANNLTSTVQVFTDDDYQLPYVVGNGTEGCLPAFPPQVFTLPQYGYATLNRDNTENPTERSSFFCLEYFPSKMLRTGNNFEFTYNFEEVPFHSSFAPSQNLFKLANPLVDQYLYRFVSTNNTGGVQFNKNLAGRYANTYKNWFPGPMGRTQGWNLGSGVNRASVSAFATTNRMELEGASYQVPPQPNGMTNNLQGSNTYALENTMIFNSQPANPGTTATYLEGNMLITSESETQPVNRVAYNVGGQMATNNQSSYPAERSHKTAPATGTYNLQEIVPGSVWMERDVYLQGPIWAKIPETGAHFHPSPAMGGFGLKHPPPMMLIKNTPVPGNITSFSDVPVSSFITQYSTGQVTVEMEWELKKENSKRWNPEIQYTNNYNDPQFVDFAPDSTGEYRTTRPIGTRYLTRPL

SEQ ID NO: 744 - protein, 588 aa, synthetic construct
TAPTGKRIDDHFPKRKKARTEEDSKPSTSSDAEAGPSGSQQLQIPAQPASSLGADTMSAGGGGPLGDNNQGADGVGNASGDWHCDSTWMGDRVVTKSTRTWVLPSYNNHQYREIKSGSVDGSNANAYFGYSTPWGYFDFNRFHSHWSPRDWQRLINNYWGFRPRSLRVKIFNIQVKEVTVQDSTTTIANNLTSTVQVFTDDDYQLPYVVGNGTEGCLPAFPPQVFTLPQYGYATLNRDNTENPTERSSFFCLEYFPSKMLRTGNNFEFTYNFEEVPFHSSFAPSQNLFKLANPLVDQYLYRFVSTNNTGGVQFNKNLAGRYANTYKNWFPGPMGRTQGWNLGSGVNRASVSAFATTNRMELEGASYQVPPQPNGMTNNLQGSNTYALENTMIFNSQPANPGTTATYLEGNMLITSESETQPVNRVAYNVGGQMATNNQSSTTAPATGTYNLQEIVPGSVWMERDVYLQGPIWAKIPETGAHFHPSPAMGGFGLKHPPPMMLIKNTPVPGNITSFSDVPVSSFITQYSTGQVTVEMEWELKKENSKRWNPEIQYTNNYNDPQFVDFAPDSTGEYRTTRPIGTRYLTRPL

SEQ ID NO: 745 - protein, 8 aa, synthetic construct
ISNSVRQS

SEQ ID NO: 746 - protein, 8 aa, synthetic construct
TTTSVNRP

SEQ ID NO: 747 - protein, 8 aa, synthetic construct
KQRQVSVQ

SEQ ID NO: 748 - protein, 8 aa, synthetic construct
RKTGVMSS

SEQ ID NO: 749 - protein, 8 aa, synthetic construct
SSKEVSRV

SEQ ID NO: 750 - protein, 532 aa, synthetic construct
MSAGGGGPLGDNNQGADGVGNASGDWHCDSTWMGDRVVTKSTRTWVLPSYNNHQYREIKSGSVDGSNANAYFGYSTPWGYFDFNRFHSHWSPRDWQRLINNYWGFRPRSLRVKIFNIQVKEVTVQDSTTTIANNLTSTVQVFTDDDYQLPYVVGNGTEGCLPAFPPQVFTLPQYGYATLNRDNTENPTERSSFFCLEYFPSKMLRTGNNFEFTYNFEEVPFHSSFAPSQNLFKLANPLVDQYLYRFVSTNNTGGVQFNKNLAGRYANTYKNWFPGPMGRTQGWNLGSGVNRASVSAFATTNRMELEGASYQVPPQPNGMTNNLQGSNTYALENTMIFNSQPANPGTTATYLEGNMLITSESETQPVNRVAYNVGGQMATNNQSSTTAPATGTYNLQEIVPGSVWMERDVYLQGPIWAKIPETGAHFHPSPAMGGFGLKHPPPMMLIKNTPVPGNITSFSDVPVSSFITQYSTGQVTVEMEWELKKENSKRWNPEIQYTNNYNDPQFVDFAPDSTGEYRTTRPIGTRYLTRPL

SEQ ID NO: 751 - protein, 16 aa, synthetic construct
TNSTHSYPAEVVQKTA

SEQ ID NO: 752 - protein, 8 aa, synthetic construct
SITGVAKM

SEQ ID NO: 753 - protein, 8 aa, synthetic construct
TSSPGMKL

SEQ ID NO: 754 - protein, 8 aa, synthetic construct
NAVGVAHG

SEQ ID NO: 755 - protein, 8 aa, synthetic construct
TKLSAVTK

SEQ ID NO: 756 - protein, 29 aa, synthetic construct
TNNQSSYPAEVVQKTAPATGTYNLQEIVP

SEQ ID NO: 757 - skipped

SEQ ID NO: 758 - protein, 8 aa, synthetic construct
VGNRVTGN

SEQ ID NO: 759-761 - skipped (3 entries)

SEQ ID NO: 762 - protein, 8 aa, synthetic construct
THAESTKQ

SEQ ID NO: 763-764 - skipped (2 entries)

SEQ ID NO: 765 - protein, 8 aa, synthetic construct
TSNAVRQQ

SEQ ID NO: 766-773 - skipped (8 entries)

SEQ ID NO: 774 - protein, 8 aa, synthetic construct
SDNLVKTD

SEQ ID NO: 775 - skipped

SEQ ID NO: 776 - protein, 8 aa, synthetic construct
SHSDVSVR

SEQ ID NO: 777-778 - skipped (2 entries)

SEQ ID NO: 779 - protein, 8 aa, synthetic construct
TIPNKVTA

SEQ ID NO: 780 - skipped

SEQ ID NO: 781 - protein, 8 aa, synthetic construct
ALNSVRRE

SEQ ID NO: 782-783 - skipped (2 entries)

SEQ ID NO: 784 - protein, 8 aa, synthetic construct
THTRIIAT

SEQ ID NO: 785-792 - skipped (8 entries)

SEQ ID NO: 793 - protein, 8 aa, synthetic construct
TMLSSAEV

SEQ ID NO: 794 - skipped

SEQ ID NO: 795 - protein, 8 aa, synthetic construct
SGNMVRAA

SEQ ID NO: 796 - skipped

SEQ ID NO: 797 - protein, 8 aa, synthetic construct
PVNVVRAS

SEQ ID NO: 798 - protein, 8 aa, synthetic construct
SGLNVTTR

SEQ ID NO: 799 - protein, 8 aa, synthetic construct
SGTEVASL

SEQ ID NO: 800 - skipped

SEQ ID NO: 801 - protein, 8 aa, synthetic construct
TLRTNESV

SEQ ID NO: 802-806 - skipped (5 entries)

SEQ ID NO: 807 - protein, 8 aa, synthetic construct
LGNRVSST

SEQ ID NO: 808-810 - skipped (3 entries)

SEQ ID NO: 811 - protein, 8 aa, synthetic construct
LVNAVKSF

SEQ ID NO: 812 - skipped

SEQ ID NO: 813 - protein, 8 aa, synthetic construct
MVNVVHQS

SEQ ID NO: 814-820 - skipped (7 entries)

SEQ ID NO: 821 - protein, 8 aa, synthetic construct
GGQGVNQS

SEQ ID NO: 822 - protein, 8 aa, synthetic construct
PSTGVVNP

SEQ ID NO: 823-829 - skipped (7 entries)

SEQ ID NO: 830 - protein, 8 aa, synthetic construct
TSPNRNQS

SEQ ID NO: 831-841 - skipped (11 entries)

SEQ ID NO: 842 - protein, 8 aa, synthetic construct
STNAVRSS

SEQ ID NO: 843 - skipped

SEQ ID NO: 844 - protein, 8 aa, synthetic construct
HSNMVRNA

SEQ ID NO: 845-846 - skipped (2 entries)

SEQ ID NO: 847 - protein, 8 aa, synthetic construct
ANTNVTRP

SEQ ID NO: 848 - protein, 8 aa, synthetic construct
ISNMVRSS

SEQ ID NO: 849 - protein, 8 aa, synthetic construct
TTALHTEE

SEQ ID NO: 850 - protein, 8 aa, synthetic construct
TRPNPSPK

SEQ ID NO: 851 - skipped

SEQ ID NO: 852 - protein, 8 aa, synthetic construct
MPNTVRAH

SEQ ID NO: 853 - skipped

SEQ ID NO: 854 - protein, 8 aa, synthetic construct
GMNSVRNA

SEQ ID NO: 855-857 - skipped (3 entries)

SEQ ID NO: 858 - protein, 8 aa, synthetic construct
TTRAQTTK

SEQ ID NO: 859-862 - skipped (4 entries)

SEQ ID NO: 863 - protein, 8 aa, synthetic construct
RQNKVTSG

SEQ ID NO: 864 - protein, 8 aa, synthetic construct
TSPNRVSY

SEQ ID NO: 865-866 - skipped (2 entries)

SEQ ID NO: 867 - protein, 8 aa, synthetic construct
TVNTTRMA

SEQ ID NO: 868 - skipped

SEQ ID NO: 869 - protein, 8 aa, synthetic construct
NLNIVRAP

SEQ ID NO: 870-871 - skipped (2 entries)

SEQ ID NO: 872 - protein, 8 aa, synthetic construct
MLNEVSRR

SEQ ID NO: 873-875 - skipped (3 entries)

SEQ ID NO: 876 - protein, 8 aa, synthetic construct
YMNSVKSF

SEQ ID NO: 877-879 - skipped (3 entries)

SEQ ID NO: 880 - protein, 8 aa, synthetic construct
TDNRVRSY

SEQ ID NO: 881-882 - skipped (2 entries)

SEQ ID NO: 883 - protein, 8 aa, synthetic construct
IKPPVPKA

SEQ ID NO: 884-885 - skipped (2 entries)

SEQ ID NO: 886 - protein, 8 aa, synthetic construct
KEESVDTS

SEQ ID NO: 887 - protein, 8 aa, synthetic construct
RKQAVSVA

SEQ ID NO: 888-890 - skipped (3 entries)

SEQ ID NO: 891 - protein, 8 aa, synthetic construct
ITSSVARS

SEQ ID NO: 892-894 - skipped (3 entries)

SEQ ID NO: 895 - protein, 8 aa, synthetic construct
TPLDKRIR

SEQ ID NO: 896 - protein, 8 aa, synthetic construct
KSRSVSGV

SEQ ID NO: 897-899 - skipped (3 entries)

SEQ ID NO: 900 - protein, 8 aa, synthetic construct
TTSKNRPD

SEQ ID NO: 901-904 - skipped (4 entries)

SEQ ID NO: 905 - protein, 8 aa, synthetic construct
TTLSVSTP

SEQ ID NO: 906-917 - skipped (12 entries)

SEQ ID NO: 918 - protein, 8 aa, synthetic construct
TLTQTVRD

SEQ ID NO: 919-921 - skipped (3 entries)

SEQ ID NO: 922 - protein, 8 aa, synthetic construct
TNQSGPGS

SEQ ID NO: 923-927 - skipped (5 entries)

SEQ ID NO: 928 - protein, 8 aa, synthetic construct
LLNKVPLN

SEQ ID NO: 929 - protein, 8 aa, synthetic construct
TPEPPTTA

SEQ ID NO: 930 - protein, 8 aa, synthetic construct
TSEPPSTE

SEQ ID NO: 931-935 - skipped (5 entries)

SEQ ID NO: 936 - protein, 8 aa, synthetic construct
AVVGVGQA

SEQ ID NO: 937-942 - skipped (6 entries)

SEQ ID NO: 943 - protein, 8 aa, synthetic construct
YPAEVVQK

SEQ ID NO: 944 - DNA, 24 bp, synthetic construct
  source 1..24: mol_type = other DNA
tatccggcggaggtggtgcagaag

SEQ ID NO: 945 - skipped

SEQ ID NO: 946 - protein, 8 aa, synthetic construct
YPPSLVQK

SEQ ID NO: 947 - protein, 8 aa, synthetic construct
NKAEVVQK

SEQ ID NO: 948 - protein, 8 aa, synthetic construct
YTAEVVQK

SEQ ID NO: 949 - protein, 8 aa, synthetic construct
YPAEVEQK

SEQ ID NO: 950 - protein, 8 aa, synthetic construct
YPAEEVQK

SEQ ID NO: 951 - protein, 8 aa, synthetic construct
YQAEVVQK

SEQ ID NO: 952 - protein, 8 aa, synthetic construct
YTPSLVQK

SEQ ID NO: 953 - protein, 8 aa, synthetic construct
YPPSLEQK

SEQ ID NO: 954 - protein, 8 aa, synthetic construct
YPPSLVKK

SEQ ID NO: 955 - protein, 8 aa, synthetic construct
YPAEVVKK

SEQ ID NO: 956 - protein, 8 aa, synthetic construct
YPAEVVHK

SEQ ID NO: 957 - protein, 8 aa, synthetic construct
YPAAVVQK

SEQ ID NO: 958 - protein, 8 aa, synthetic construct
NPAEVVQK

SEQ ID NO: 959 - protein, 8 aa, synthetic construct
YPAEVVQQ

SEQ ID NO: 960 - protein, 8 aa, synthetic construct
CPAEVVQK

SEQ ID NO: 961 - protein, 8 aa, synthetic construct
YTAEVVKK

SEQ ID NO: 962 - protein, 8 aa, synthetic construct
YPAEVLQK

SEQ ID NO: 963 - protein, 8 aa, synthetic construct
YQAEEVQK

SEQ ID NO: 964 - protein, 8 aa, synthetic construct
YPAEVVQN

SEQ ID NO: 965 - protein, 8 aa, synthetic construct
TEAEVVQK

SEQ ID NO: 966 - protein, 8 aa, synthetic construct
YPADVVQK

SEQ ID NO: 967 - protein, 8 aa, synthetic construct
TPVSVNTH

SEQ ID NO: 968-974 - skipped (7 entries)

SEQ ID NO: 975 - protein, 8 aa, synthetic construct
TTETASRG

SEQ ID NO: 976-978 - skipped (3 entries)

SEQ ID NO: 979 - protein, 8 aa, synthetic construct
YFTGVKSE

SEQ ID NO: 980-981 - skipped (2 entries)

SEQ ID NO: 982 - protein, 731 aa, synthetic construct
MSFVDHPPDWLEEVGEGLREFLGLEAGPPKPKPNQQHQDQARGLVLPGYNYLGPGNGLDRGEPVNRADEVAREHDISYNEQLEAGDNPYLKYNHADAEFQEKLADDTSFGGNLGKAVFQAKKRVLEPFGLVEEGAKTAPTGKRIDDHFPKRKKARTEEDSKPSTSSDAEAGPSGSQQLQIPAQPASSLGADTMSAGGGGPLGDNNQGADGVGNASGDWHCDSTWMGDRVVTKSTRTWVLPSYNNHQYREIKSGSVDGSNANAYFGYSTPWGYFDFNRFHSHWSPRDWQRLINNYWGFRPRSLRVKIFNIQVKEVTVQDSTTTIANNLTSTVQVFTDDDYQLPYVVGNGTEGCLPAFPPQVFTLPQYGYATLNRDNTENPTERSSFFCLEYFPSKMLRTGNNFEFTYNFEEVPFHSSFAPSQNLFKLANPLVDQYLYRFVSTNNTGGVQFNKNLAGRYANTYKNWFPGPMGRTQGWNLGSGVNRASVSAFATTNRMELEGASYQVPPQPNGMTNNLQGSNTYALENTMIFNSQPANPGTTATYLEGNMLITSESETQPVNRVAYNVGGQMATNNQSSYPAEVVQKTAPATGTYNLQEIVPGSVWMERDVYLQGPIWAKIPETGAHFHPSPAMGGFGLKHPPPMMLIKNTPVPGNITSFSDVPVSSFITQYSTGQVTVEMEWELKKENSKRWNPEIQYTNNYNDPQFVDFAPDSTGEYRTTRPIGTRYLTRPL

SEQ ID NO: 983 - skipped

SEQ ID NO: 984 - DNA, 2196 bp, synthetic construct
  source 1..2196: mol_type = other DNA
atgtcttttgttgatcaccctccagattggttggaagaagttggtgaaggtcttcgcgagtttttgggccttgaagcgggcccaccgaaaccaaaacccaatcagcagcatcaagatcaagcccgtggtcttgtgctgcctggttataactatctcggacccggaaacggtctcgatcgaggagagcctgtcaacagggcagacgaggtcgcgcgagagcacgacatctcgtacaacgagcagcttgaggcgggagacaacccctacctcaagtacaaccacgcggacgccgagtttcaggagaagctcgccgacgacacatccttcgggggaaacctcggaaaggcagtctttcaggccaagaaaagggttctcgaaccttttggcctggttgaagagggtgctaagacggcccctaccggaaagcggatagacgaccactttccaaaaagaaagaaggcccggaccgaagaggactccaagccttccacctcgtcagacgccgaagctggacccagcggatcccagcagctgcaaatcccagcccaaccagcctcaagtttgggagctgatacaatgtctgcgggaggtggcggcccattgggcgacaataaccaaggtgccgatggagtgggcaatgcctcgggagattggcattgcgattccacgtggatgggggacagagtcgtcaccaagtccacccgaacctgggtgctgcccagctacaacaaccaccagtaccgagagatcaaaagcggctccgtcgacggaagcaacgccaacgcctactttggatacagcaccccctgggggtactttgactttaaccgcttccacagccactggagcccccgagactggcaaagactcatcaacaactactggggcttcagaccccggtccctcagagtcaaaatcttcaacattcaagtcaaagaggtcacggtgcaggactccaccaccaccatcgccaacaacctcacctccaccgtccaagtgtttacggacgacgactaccagctgccctacgtcgtcggcaacgggaccgagggatgcctgccggccttccctccgcaggtctttacgctgccgcagtacggttacgcgacgctgaaccgcgacaacacagaaaatcccaccgagaggagcagcttcttctgcctagagtactttcccagcaagatgctgagaacgggcaacaactttgagtttacctacaactttgaggaggtgcccttccactccagcttcgctcccagtcagaacctcttcaagctggccaacccgctggtggaccagtacttgtaccgcttcgtgagcacaaataacactggcggagtccagttcaacaagaacctggccgggagatacgccaacacctacaaaaactggttcccggggcccatgggccgaacccagggctggaacctgggctccggggtcaaccgcgccagtgtcagcgccttcgccacgaccaataggatggagctcgagggcgcgagttaccaggtgcccccgcagccgaacggcatgaccaacaacctccagggcagcaacacctatgccctggagaacactatgatcttcaacagccagccggcgaacccgggcaccaccgccacgtacctcgagggcaacatgctcatcaccagcgagagcgagacgcagccggtgaaccgcgtggcgtacaacgtcggcgggcagatggccaccaacaaccagagctcttatccggcggaggtggtgcagaagactgcccccgcgaccggcacgtacaacctccaggaaatcgtgcccggcagcgtgtggatggagagggacgtgtacctccaaggacccatctgggccaagatcccagagacgggggcgcactttcacccctctccggctatgggcggattcggactcaaacacccaccgcccatgatgctcatcaagaacacgcctgtgcccggaaatatcaccagcttctcggacgtgcccgtcagcagcttcatcacccagtacagcaccgggcaggtcaccgtggagatggagtgggagctcaagaaggaaaactccaagaggtggaacccagagatccagtacacaaacaactacaacgacccccagtttgtggactttgccccggacagcaccggggaatacagaaccaccagacctatcggaacccgataccttacccgacccctttaa

SEQ ID NO: 985-999 - skipped (15 entries)

SEQ ID NO: 1000 - protein, 16 aa, synthetic construct
TNNFFMYPAEVVQKTA

SEQ ID NO: 1001 - protein, 16 aa, synthetic construct
TNNQSSYPAEALLKTA

SEQ ID NO: 1002 - protein, 16 aa, synthetic construct
TNNQGTYPAEVVQKTA

SEQ ID NO: 1003 - protein, 16 aa, synthetic construct
TISASSYPAEVVQKTA

SEQ ID NO: 1004 - protein, 16 aa, synthetic construct
TNGVHSYPAEVVQKTA

SEQ ID NO: 1005 - protein, 16 aa, synthetic construct
TNNHSAYPAEVVQKTA

SEQ ID NO: 1006 - protein, 16 aa, synthetic construct
TNNMAPYPAEVVQKTA

SEQ ID NO: 1007 - protein, 16 aa, synthetic construct
TNNIATYPAEVVQKTA

SEQ ID NO: 1008 - protein, 16 aa, synthetic construct
TNQISSYPAEVVQKTA

SEQ ID NO: 1009 - protein, 16 aa, synthetic construct
TNNQSSYPAEVVQKLS

SEQ ID NO: 1010 - protein, 16 aa, synthetic construct
TNNLGQYPAEVVQKTA

SEQ ID NO: 1011 - protein, 16 aa, synthetic construct
TNNPGAYPAEVVQKTA

SEQ ID NO: 1012 - protein, 16 aa, synthetic construct
TNNQSSYPAEVVQKLK

SEQ ID NO: 1013 - protein, 16 aa, synthetic construct
TNNQSSYPAAIIQKTA

SEQ ID NO: 1014 - protein, 16 aa, synthetic construct
TNNQSSYNTKVVQKTA

SEQ ID NO: 1015 - protein, 16 aa, synthetic construct
TNKITSYPAEVVQKTA

SEQ ID NO: 1016 - protein, 16 aa, synthetic construct
TNNIGRYPAEVVQKTA

SEQ ID NO: 1017 - protein, 16 aa, synthetic construct
TNLIASYPAEVVQKTA

SEQ ID NO: 1018 - protein, 16 aa, synthetic construct
TNNTAGYPAEVVQKTA

SEQ ID NO: 1019 - protein, 16 aa, synthetic construct
TNNMAKYPAEVVQKTA

SEQ ID NO: 1020 - protein, 16 aa, synthetic construct
TNNMAQYPAEVVQKTA

SEQ ID NO: 1021 - protein, 16 aa, synthetic construct
TNNAGAYPAEVVQKTA

SEQ ID NO: 1022 - protein, 16 aa, synthetic construct
TMSASSYPAEVVQKTA

SEQ ID NO: 1023 - protein, 16 aa, synthetic construct
TNNAAVYPAEVVQKTA

SEQ ID NO: 1024 - protein, 16 aa, synthetic construct
INNQSSYPAEVVQKTA

SEQ ID NO: 1025 - protein, 16 aa, synthetic construct
TNNNSKYPAEVVQKTA

SEQ ID NO: 1026 - protein, 16 aa, synthetic construct
TNNTSHYPAEVVQKTA

SEQ ID NO: 1027 - protein, 16 aa, synthetic construct
TNNLGSYPAEVVQKTA

SEQ ID NO: 1028 - protein, 16 aa, synthetic construct
TNNQSSYPAEVISKTA

SEQ ID NO: 1029 - protein, 16 aa, synthetic construct
TNLIDSYPAEVVQKTA

SEQ ID NO: 1030 - protein, 16 aa, synthetic construct
TNNTSGYPAEVVQKTA

SEQ ID NO: 1031 - protein, 16 aa, synthetic construct
TNNQSSYPANDTQKTA

SEQ ID NO: 1032 - protein, 16 aa, synthetic construct
TNNTAQYPAEVVQKTA

SEQ ID NO: 1033 - protein, 16 aa, synthetic construct
TNLVSSYPAEVVQKTA

SEQ ID NO: 1034 - protein, 16 aa, synthetic construct
TNNVSQYPAEVVQKTA

SEQ ID NO: 1035 - protein, 16 aa, synthetic construct
TNNMSMYPAEVVQKTA

SEQ ID NO: 1036 - protein, 16 aa, synthetic construct
TNSVSSYPAEVVQKTA

SEQ ID NO: 1037 - protein, 16 aa, synthetic construct
TNSIGSYPAEVVQKTA

SEQ ID NO: 1038 - protein, 16 aa, synthetic construct
TNNVSYYPAEVVQKTA

SEQ ID NO: 1039 - protein, 16 aa, synthetic construct
TNNAASYPAEVVQKTA

SEQ ID NO: 1040 - protein, 16 aa, synthetic construct
TNNMSIYPAEVVQKTA

SEQ ID NO: 1041 - protein, 16 aa, synthetic construct
TNNVSGYPAEVVQKTA

SEQ ID NO: 1042 - protein, 16 aa, synthetic construct
TNNMASYPAEVVQKTA

SEQ ID NO: 1043 - protein, 16 aa, synthetic construct
TNNQSSYPAQIVQKTA

SEQ ID NO: 1044 - protein, 16 aa, synthetic construct
TNKISSYPAEVVQKTA

SEQ ID NO: 1045 - protein, 16 aa, synthetic construct
TNRVSSYPAEVVQKTA

SEQ ID NO: 1046 - protein, 16 aa, synthetic construct
TNNVGYYPAEVVQKTA

SEQ ID NO: 1047 - protein, 16 aa, synthetic construct
TNNLGAYPAEVVQKTA

SEQ ID NO: 1048 - protein, 16 aa, synthetic construct
TNNTSQYPAEVVQKTA

SEQ ID NO: 1049 - protein, 16 aa, synthetic construct
TNNQSSYPPKVVQKTA

SEQ ID NO: 1050 - protein, 16 aa, synthetic construct
TNNVTMYPAEVVQKTA

SEQ ID NO: 1051 - protein, 16 aa, synthetic construct
TNNQSSNPTEVVQKTA

SEQ ID NO: 1052 - protein, 16 aa, synthetic construct
TNNIAWYPAEVVQKTA

SEQ ID NO: 1053 - protein, 16 aa, synthetic construct
TNNAAAYPAEVVQKTA

SEQ ID NO: 1054 - protein, 16 aa, synthetic construct
TNNTASYPAEVVQKTA

SEQ ID NO: 1055 - protein, 16 aa, synthetic construct
TNKVASYPAEVVQKTA

SEQ ID NO: 1056 - protein, 16 aa, synthetic construct
TNNIGTYPAEVVQKTA

SEQ ID NO: 1057 - protein, 16 aa, synthetic construct
TNNLSKYPAEVVQKTA

SEQ ID NO: 1058 - protein, 16 aa, synthetic construct
TNNLAKYPAEVVQKTA

SEQ ID NO: 1059 - protein, 16 aa, synthetic construct
TNNQARYPAEVVQKTA

SEQ ID NO: 1060 - protein, 16 aa, synthetic construct
TNNQSSYPATIIQKTA

SEQ ID NO: 1061 - protein, 16 aa, synthetic construct
TNNISHYPAEVVQKTA

SEQ ID NO: 1062 - protein, 16 aa, synthetic construct
TKTTSSYPAEVVQKTA

SEQ ID NO: 1063 - protein, 16 aa, synthetic construct
TNNQSSYPAEVVSKLA

SEQ ID NO: 1064 - protein, 16 aa, synthetic construct
TNFVASYPAEVVQKTA

SEQ ID NO: 1065 - protein, 16 aa, synthetic construct
TNNTSDYPAEVVQKTA

SEQ ID NO: 1066 - protein, 16 aa, synthetic construct
TNNQSSYPPELVQKTA

SEQ ID NO: 1067 - protein, 16 aa, synthetic construct
TNNMSLYPAEVVQKTA

SEQ ID NO: 1068 - protein, 16 aa, synthetic construct
TNNQEKYPAEVVQKTA

SEQ ID NO: 1069 - protein, 16 aa, synthetic construct
TNNQSSYPADIVQKTA

SEQ ID NO: 1070 - protein, 16 aa, synthetic construct
TNNMAMYPAEVVQKTA

SEQ ID NO: 1071 - protein, 16 aa, synthetic construct
TNNQSSYPAELIEKTA

SEQ ID NO: 1072 - protein, 16 aa, synthetic construct
TNNQSSYPPDVVQKTA

SEQ ID NO: 1073 - protein, 16 aa, synthetic construct
TNNLSAYPAEVVQKTA

SEQ ID NO: 1074 - protein, 16 aa, synthetic construct
TNNIAHYPAEVVQKTA

SEQ ID NO: 1075 - protein, 16 aa, synthetic construct
TNNHAKYPAEVVQKTA

SEQ ID NO: 1076 - protein, 16 aa, synthetic construct
TNNMSRYPAEVVQKTA

SEQ ID NO: 1077 - protein, 16 aa, synthetic construct
TNNTSSYPAEVVQKTA

SEQ ID NO: 1078 - protein, 16 aa, synthetic construct
TNNPAAYPAEVVQKTA

SEQ ID NO: 1079 - protein, 16 aa, synthetic construct
TNSTFSYPAEVVQKTA

SEQ ID NO: 1080 - protein, 16 aa, synthetic construct
TNNQSSYPAEVVQKTS

SEQ ID NO: 1081 - protein, 16 aa, synthetic construct
TNNQSSYPAEVVQKSS

SEQ ID NO: 1082 - protein, 16 aa, synthetic construct
TNNTSIYPAEVVQKTA

SEQ ID NO: 1083 - protein, 16 aa, synthetic construct
TNNLAYYPAEVVQKTA

SEQ ID NO: 1084 - skipped

SEQ ID NO: 1085 - protein, 16 aa, synthetic construct
TNNMGYYPAEVVQKTA

SEQ ID NO: 1086 - protein, 16 aa, synthetic construct
TNLVSSYPAEVVQKPA

SEQ ID NO: 1087 - protein, 16 aa, synthetic construct
TNNQAIYPAEVVQKTA

SEQ ID NO: 1088 - protein, 16 aa, synthetic construct
TNNPNSYPAEVVQKTA

SEQ ID NO: 1089 - protein, 16 aa, synthetic construct
TKTISSYPAEVVQKTA

SEQ ID NO: 1090 - protein, 16 aa, synthetic construct
TNNIASYPAEVVQKTA

SEQ ID NO: 1091 - protein, 16 aa, synthetic construct
TNMIASYPAEVVQKTA

SEQ ID NO: 1092 - protein, 16 aa, synthetic construct
TNNMGAYPAEVVQKTA

SEQ ID NO: 1093 - protein, 16 aa, synthetic construct
TNAVHSYPAEVVQKTA

SEQ ID NO: 1094 - protein, 16 aa, synthetic construct
TNNISNYPAEVVQKTA

SEQ ID NO: 1095 - protein, 16 aa, synthetic construct
TKSASSYPAEVVQKTA

SEQ ID NO: 1096 - protein, 16 aa, synthetic construct
TNNVGRYPAEVVQKTA

SEQ ID NO: 1097 - protein, 16 aa, synthetic construct
TNNMSVYPAEVVQKTA

SEQ ID NO: 1098 - protein, 16 aa, synthetic construct
TNNVSTYPAEVVQKTA

SEQ ID NO: 1099 - protein, 16 aa, synthetic construct
TNNTSAYPAEVVQKTA

SEQ ID NO: 1100 - protein, 16 aa, synthetic construct
TNNQSSYPAEVVNKTA

SEQ ID NO: 1101 - protein, 16 aa, synthetic construct
TNNQAMYPAEVVQKTA

SEQ ID NO: 1102 - protein, 16 aa, synthetic construct
TNNQSSYPAEVIQKTA

SEQ ID NO: 1103 - protein, 16 aa, synthetic construct
TNNASAYPAEVVQKTA

SEQ ID NO: 1104 - protein, 16 aa, synthetic construct
TNNLAAYPAEVVQKTA

SEQ ID NO: 1105 - protein, 16 aa, synthetic construct
TNKVSSYPAEVVQKTA

SEQ ID NO: 1106 - protein, 16 aa, synthetic construct
TNNQSSYPANLIQKTA

SEQ ID NO: 1107 - protein, 16 aa, synthetic construct
TNNQSSYPSDIVQKTA

SEQ ID NO: 1108 - protein, 16 aa, synthetic construct
TNNQSSRESEVVQKTA

SEQ ID NO: 1109 - protein, 16 aa, synthetic construct
TNNISRYPAEVVQKTA

SEQ ID NO: 1110 - protein, 16 aa, synthetic construct
TNNTAPYPAEVVQKTA

SEQ ID NO: 1111 - protein, 16 aa, synthetic construct
TNNQSQYPAEVVQKTA

SEQ ID NO: 1112 - protein, 16 aa, synthetic construct
TNNIGSYPAEVVQKTA

SEQ ID NO: 1113 - protein, 16 aa, synthetic construct
TNNIGVYPAEVVQKTA

SEQ ID NO: 1114 - protein, 16 aa, synthetic construct
TNNTNSYPAEVVQKTA

SEQ ID NO: 1115 - protein, 16 aa, synthetic construct
TNNIARYPAEVVQKTA

SEQ ID NO: 1116 - protein, 16 aa, synthetic construct
TNNLSRYPAEVVQKTA

SEQ ID NO: 1117 - protein, 16 aa, synthetic construct
TNNQSSYPEQVVQKTA

SEQ ID NO: 1118 - protein, 16 aa, synthetic construct
TNKNASYPAEVVQKTA

SEQ ID NO: 1119 - protein, 16 aa, synthetic construct
TNNTSTYPAEVVQKTA

SEQ ID NO: 1120 - protein, 16 aa, synthetic construct
TNNSSIYPAEVVQKTA

SEQ ID NO: 1121 - protein, 16 aa, synthetic construct
TNNQSSYPAEVVQKTT

SEQ ID NO: 1122 - protein, 16 aa, synthetic construct
TNSGWSYPAEVVQKTA

SEQ ID NO: 1123 - protein, 16 aa, synthetic construct
TNFIASYPAEVVQKTA

SEQ ID NO: 1124 - protein, 16 aa, synthetic construct
TNSTWSYPAEVVQKTA

SEQ ID NO: 1125 - protein, 16 aa, synthetic construct
TNNLGNYPAEVVQKTA

SEQ ID NO: 1126 - protein, 16 aa, synthetic construct
TNNQSSYPPSIVQKTA

SEQ ID NO: 1127 - protein, 16 aa, synthetic construct
TVASSSYPAEVVQKTA

SEQ ID NO: 1128 - protein, 16 aa, synthetic construct
TNNQSSYPAELIAKTA

SEQ ID NO: 1129 - protein, 16 aa, synthetic construct
TNNLARYPAEVVQKTA

SEQ ID NO: 1130 - protein, 16 aa, synthetic construct
TNNQSSYPAEVVQKLN

SEQ ID NO: 1131 - protein, 16 aa, synthetic construct
TNNLSQYPAEVVQKTA

SEQ ID NO: 1132 - protein, 16 aa, synthetic construct
TNNISYYPAEVVQKTA

SEQ ID NO: 1133 - protein, 16 aa, synthetic construct
TNNSSVYPAEVVQKTA

SEQ ID NO: 1134 - protein, 16 aa, synthetic construct
TNNQSSYPAEIVHKTA

SEQ ID NO: 1135 - protein, 16 aa, synthetic construct
TNNLSVYPAEVVQKTA

SEQ ID NO: 1136 - protein, 16 aa, synthetic construct
TNITGSYPAEVVQKTA

SEQ ID NO: 1137 - protein, 16 aa, synthetic construct
TNNMSKYPAEVVQKTA

SEQ ID NO: 1138 - protein, 16 aa, synthetic construct
TNNCGSYPAEVVQKTA

SEQ ID NO: 1139 - protein, 16 aa, synthetic construct
TNNVSSYPAEVVQKTA

SEQ ID NO: 1140 - protein, 16 aa, synthetic construct
TNNIALYPAEVVQKTA

SEQ ID NO: 1141 - protein, 16 aa, synthetic construct
TNNQLSIPAEVVQKTA

SEQ ID NO: 1142 - protein, 16 aa, synthetic construct
TNNSSSYPAEVVQKPA

SEQ ID NO: 1143 - protein, 16 aa, synthetic construct
TNNQSSYPAAVIQKTA

SEQ ID NO: 1144 - protein, 16 aa, synthetic construct
TNNQSSYPAEIISKTA

SEQ ID NO: 1145 - protein, 16 aa, synthetic construct
TNCVSSYPAEVVQKTA

SEQ ID NO: 1146 - protein, 16 aa, synthetic construct
TNNTARYPAEVVQKTA

SEQ ID NO: 1147 - protein, 16 aa, synthetic construct
TNNQSSYPAEVINKTA

SEQ ID NO: 1148 - protein, 16 aa, synthetic construct
TNSIASYPAEVVQKTA

SEQ ID NO: 1149 - protein, 16 aa, synthetic construct
TNNQSSREAEVVQKTA

SEQ ID NO: 1150 - protein, 16 aa, synthetic construct
TNNITRYPAEVVQKTA

SEQ ID NO: 1151 - protein, 16 aa, synthetic construct
TNNTSVYPAEVVQKTA

SEQ ID NO: 1152 - protein, 16 aa, synthetic construct
TNNTGSYPAEVVQKTA

SEQ ID NO: 1153 - protein, 16 aa, synthetic construct
TNNMSQYPAEVVQKTA

SEQ ID NO: 1154 - protein, 16 aa, synthetic construct
TNNISSYPAEVVQKTA

SEQ ID NO: 1155 - protein, 16 aa, synthetic construct
TNNSASYPAEVVQKTA

SEQ ID NO: 1156 - protein, 16 aa, synthetic construct
TNSISSYPAEVVQKTA

SEQ ID NO: 1157 - protein, 16 aa, synthetic construct
TNNISMYPAEVVQKTA

SEQ ID NO: 1158 - protein, 16 aa, synthetic construct
TNNTATYPAEVVQKTA

SEQ ID NO: 1159 - protein, 16 aa, synthetic construct
TNNISTYPAEVVQKTA

SEQ ID NO: 1160 - protein, 16 aa, synthetic construct
TNNVSHYPAEVVQKTA

SEQ ID NO: 1161 - protein, 16 aa, synthetic construct
TNNSGSYPAEVVQKTA

SEQ ID NO: 1162 - protein, 16 aa, synthetic construct
TNNLASYPAEVVQKTA

SEQ ID NO: 1163 - protein, 16 aa, synthetic construct
TNNVSFYPAEVVQKTA

SEQ ID NO: 1164 - protein, 16 aa, synthetic construct
TNNQSSYPVQVVQKTA

SEQ ID NO: 1165 - protein, 16 aa, synthetic construct
TNNQAAYPAEVVQKTA

SEQ ID NO: 1166 - protein, 16 aa, synthetic construct
TNQVSSYPAEVVQKTA

SEQ ID NO: 1167 - protein, 16 aa, synthetic construct
TNSVGSYPAEVVQKTA

SEQ ID NO: 1168 - protein, 16 aa, synthetic construct
TNTPASYPAEVVQKTA

SEQ ID NO: 1169 - protein, 16 aa, synthetic construct
TNNLAMYPAEVVQKTA

SEQ ID NO: 1170 - protein, 16 aa, synthetic construct
TNTTSSYPAEVVQKTA

SEQ ID NO: 1171 - skipped

SEQ ID NO: 1172 - protein, 16 aa, synthetic construct
TNNQSSYPAEVVQNLK

SEQ ID NO: 1173 - protein, 16 aa, synthetic construct
TNNLSIYPAEVVQKTA

SEQ ID NO: 1174 - protein, 16 aa, synthetic construct
TNNQSSYPAQVVQKTA

SEQ ID NO: 1175 - protein, 16 aa, synthetic construct
TNTSASYPAEVVQKTA

SEQ ID NO: 1176 - protein, 16 aa, synthetic construct
TNNTSKYPAEVVQKTA

SEQ ID NO: 1177 - protein, 16 aa, synthetic construct
TNNTTVYPAEVVQKTA

SEQ ID NO: 1178 - protein, 16 aa, synthetic construct
TNNQSSYPPEVVQKTA

SEQ ID NO: 1179 - protein, 16 aa, synthetic construct
TNNQSSYPAEVMSRTA

SEQ ID NO: 1180 - protein, 16 aa, synthetic construct
TNNASQYPAEVVQKTA

SEQ ID NO: 1181 - protein, 16 aa, synthetic construct
TNNTSYYPAEVVQKTA

SEQ ID NO: 1182 - protein, 16 aa, synthetic construct
TNNVSMYPAEVVQKTA

SEQ ID NO: 1183 - protein, 16 aa, synthetic construct
TNNLGRYPAEVVQKTA

SEQ ID NO: 1184 - protein, 16 aa, synthetic construct
TNNVAPYPAEVVQKTA

SEQ ID NO: 1185 - protein, 16 aa, synthetic construct
TNNQSIYPAEVVQKTA

SEQ ID NO: 1186 - skipped

SEQ ID NO: 1187 - protein, 16 aa, synthetic construct
TNKIASYPAEVVQKTA

SEQ ID NO: 1188 - protein, 16 aa, synthetic construct
TNNSSRYPAEVVQKTA

SEQ ID NO: 1189 - protein, 16 aa, synthetic construct
TNNQSSYPAAVVQKTA

SEQ ID NO: 1190 - protein, 16 aa, synthetic construct
TNNQSSYPAEVVQKLT

SEQ ID NO: 1191 - protein, 16 aa, synthetic construct
TNTIASYPAEVVQKTA

SEQ ID NO: 1192 - protein, 16 aa, synthetic construct
TNTLSSYPAEVVQKTA

SEQ ID NO: 1193 - protein, 16 aa, synthetic construct
TNNQSSYPAKLIQKTA

SEQ ID NO: 1194 - protein, 16 aa, synthetic construct
TNNQASYPAEVVQKTA

SEQ ID NO: 1195 - protein, 16 aa, synthetic construct
TNNVGSYPAEVVQKTA

SEQ ID NO: 1196 - protein, 16 aa, synthetic construct
HTRQSSYPAEVVQKTA

SEQ ID NO: 1197 - protein, 16 aa, synthetic construct
TNNMGSYPAEVVQKTA

SEQ ID NO: 1198 - protein, 16 aa, synthetic construct
TNNVASYPAEVVQKTA

SEQ ID NO: 1199 - protein, 16 aa, synthetic construct
TNNASGYPAEVVQKTA

SEQ ID NO: 1200 - protein, 16 aa, synthetic construct
TNSPWSYPAEVVQKTA

SEQ ID NO: 1201 - protein, 16 aa, synthetic construct
TNNVSNYPAEVVQKTA

SEQ ID NO: 1202 - protein, 16 aa, synthetic construct
TNNQAKYPAEVVQKTA

SEQ ID NO: 1203 - skipped

SEQ ID NO: 1204 - protein, 16 aa, synthetic construct
TNNQTTPPAEVVQKTA

SEQ ID NO: 1205 - protein, 16 aa, synthetic construct
TSSASSYPAEVVQKTA

SEQ ID NO: 1206 - protein, 16 aa, synthetic construct
TNNTSFYPAEVVQKTA

SEQ ID NO: 1207 - protein, 16 aa, synthetic construct
TNNLANYPAEVVQKTA

SEQ ID NO: 1208 - protein, 16 aa, synthetic construct
TNNTSRYPAEVVQKTA

SEQ ID NO: 1209 - protein, 16 aa, synthetic construct
TNNQSSYPASVVKKTA

SEQ ID NO: 1210 - protein, 16 aa, synthetic construct
TLQQSSYPAEVVQKTA

SEQ ID NO: 1211 - protein, 16 aa, synthetic construct
TNNQSSYPAGVIQKTA

SEQ ID NO: 1212 - protein, 16 aa, synthetic construct
TNNQSSYPAETMSKTA

SEQ ID NO: 1213 - protein, 16 aa, synthetic construct
TYTLSSYPAEVVQKTA

SEQ ID NO: 1214 - protein, 16 aa, synthetic construct
TNNSSSYTAEVVQKTA

SEQ ID NO: 1215 - protein, 16 aa, synthetic construct
TNNTALYPAEVVQKTA

SEQ ID NO: 1216 - protein, 16 aa, synthetic construct
TNNLTYYPAEVVQKTA

SEQ ID NO: 1217 - protein, 16 aa, synthetic construct
TNNQSSYPAMVIQKTA

SEQ ID NO: 1218 - protein, 16 aa, synthetic construct
TNNVTRYPAEVVQKTA

SEQ ID NO: 1219 - protein, 16 aa, synthetic construct
TNNMSAYPAEVVQKTA

SEQ ID NO: 1220 - protein, 16 aa, synthetic construct
TNNQSSYPAEVIAKTA

SEQ ID NO: 1221 - protein, 16 aa, synthetic construct
TNNLAQYPAEVVQKTA

SEQ ID NO: 1222 - protein, 16 aa, synthetic construct
TNNTGGYPAEVVQKTA

SEQ ID NO: 1223 - protein, 16 aa, synthetic construct
TNNQSSYPAEIVQKTA

SEQ ID NO: 1224 - protein, 16 aa, synthetic construct
TNNISAYPAEVVQKTA

SEQ ID NO: 1225 - protein, 16 aa, synthetic construct
TNNQSMYPAEVVQKTA

SEQ ID NO: 1226 - protein, 16 aa, synthetic construct
TNTLGSYPAEVVQKTA

SEQ ID NO: 1227 - protein, 16 aa, synthetic construct
TNNQSSYPAESVQKTA

SEQ ID NO: 1228 - protein, 16 aa, synthetic construct
TNNPSGYPAEVVQKTA

SEQ ID NO: 1229 - protein, 16 aa, synthetic construct
TNNQDNMPAEVVQKTA

SEQ ID NO: 1230 - protein, 16 aa, synthetic construct
TNNVSLYPAEVVQKTA

SEQ ID NO: 1231 - protein, 16 aa, synthetic construct
TNNASSYPAEVVQKTA

SEQ ID NO: 1232 - protein, 16 aa, synthetic construct
TNNTSLYPAEVVQKTA

SEQ ID NO: 1233 - protein, 16 aa, synthetic construct
TNNQSSYPASVVQKTA

SEQ ID NO: 1234 - protein, 16 aa, synthetic construct
TNNQSSYPAELISKTA

SEQ ID NO: 1235 - protein, 16 aa, synthetic construct
TNSVHSYPAEVVQKTA

SEQ ID NO: 1236 - protein, 16 aa, synthetic construct
TNSVWSYPAEVVQKTA

SEQ ID NO: 1237 - protein, 16 aa, synthetic construct
TTTPSSYPAEVVQKTA

SEQ ID NO: 1238 - protein, 16 aa, synthetic construct
TTTTSSYPAEVVQKTA

SEQ ID NO: 1239 - skipped

SEQ ID NO: 1240 - protein, 16 aa, synthetic construct
TNNQSSYPESNVQKTA

SEQ ID NO: 1241 - protein, 16 aa, synthetic construct
TNNQSSYPPDLVQKTA

SEQ ID NO: 1242 - protein, 16 aa, synthetic construct
TNLVASYPAEVVQKTA

SEQ ID NO: 1243 - protein, 16 aa, synthetic construct
TNLVSSYQAEVVQKTA

SEQ ID NO: 1244 - protein, 16 aa, synthetic construct
TNNQSVYPAEVVQKTA

SEQ ID NO: 1245 - protein, 16 aa, synthetic construct
TNNQGYYPAEVVQKTA

SEQ ID NO: 1246-1247 - skipped (2 entries)

SEQ ID NO: 1248 - protein, 16 aa, synthetic construct
TNSPRSYPAEVVQKTA

SEQ ID NO: 1249 - protein, 16 aa, synthetic construct
TNNQSSYPASLIQKTA

SEQ ID NO: 1250 - protein, 16 aa, synthetic construct
TNNSTRYPAEVVQKTA

SEQ ID NO: 1251 - protein, 16 aa, synthetic construct
TNNSGAYPAEVVQKTA

SEQ ID NO: 1252 - protein, 16 aa, synthetic construct
TNNLAIYPAEVVQKTA

SEQ ID NO: 1253 - protein, 16 aa, synthetic construct
TNHVASYPAEVVQKTA

SEQ ID NO: 1254 - protein, 16 aa, synthetic construct
TNNQSKYPAEVEQKTA

SEQ ID NO: 1255 - protein, 16 aa, synthetic construct
TNNHASYPAEVVQKTA

SEQ ID NO: 1256 - protein, 16 aa, synthetic construct
TNSESSYPAEVVQKTA

SEQ ID NO: 1257 - protein, 16 aa, synthetic construct
TNNQSSYPANSVQKTA

SEQ ID NO: 1258 - protein, 16 aa, synthetic construct
TNNQSSYPAELVHKTA

SEQ ID NO: 1259 - protein, 16 aa, synthetic construct
TNNQSSYPPNSVQKTA

SEQ ID NO: 1260 - protein, 16 aa, synthetic construct
TNNTAKYPAEVVQKTA

SEQ ID NO: 1261 - protein, 16 aa, synthetic construct
TNNKTSYPAEVVQKTA

SEQ ID NO: 1262 - protein, 16 aa, synthetic construct
TNNNSNYPAEVVQKTA

SEQ ID NO: 1263 - protein, 16 aa, synthetic construct
TNTLSSYQAEVVQKTA

SEQ ID NO: 1264 - protein, 16 aa, synthetic construct
TNRISSYPAEVVQKTA

SEQ ID NO: 1265 - protein, 16 aa, synthetic construct
TNNQSSYPATLIQKTA

SEQ ID NO: 1266 - protein, 16 aa, synthetic construct
TNNGVSYPAEVVQKTA

SEQ ID NO: 1267 - protein, 16 aa, synthetic construct
TNNTSSYPAEVVQKPA

SEQ ID NO: 1268 - protein, 16 aa, synthetic construct
TNNQSSYPAEVVQKTP

SEQ ID NO: 1269 - protein, 16 aa, synthetic construct
TNNQSSYPAELVQKTA

SEQ ID NO: 1270 - protein, 16 aa, synthetic construct
TNSLWSYPAEVVQKTA

SEQ ID NO: 1271 - protein, 16 aa, synthetic construct
TNNQSSYPAETVSKTA

SEQ ID NO: 1272 - protein, 16 aa, synthetic construct
TNNISLYPAEVVQKTA

SEQ ID NO: 1273 - protein, 16 aa, synthetic construct
TNNQSSYPAEVVQKST

SEQ ID NO: 1274 - protein, 16 aa, synthetic construct
TNNQSSYPAELVSKTA

SEQ ID NO: 1275 - protein, 16 aa, synthetic construct
TNNTGRYPAEVVQKTA

SEQ ID NO: 1276 - protein, 16 aa, synthetic construct
TYSTSSYPAEVVQKTA

SEQ ID NO: 1277 - protein, 16 aa, synthetic construct
TNTLSSYTAEVVQKTA

SEQ ID NO: 1278 - protein, 16 aa, synthetic construct
TNSTSSYPAEVVQKTA

SEQ ID NO: 1279 - protein, 16 aa, synthetic construct
TNAVFSYPAEVVQKTA

SEQ ID NO: 1280 - protein, 16 aa, synthetic construct
TNSTYSYPAEVVQKTA

SEQ ID NO: 1281 - protein, 16 aa, synthetic construct
TNNLSMYPAEVVQKTA

SEQ ID NO: 1282 - protein, 16 aa, synthetic construct
TNNQSSYPATLVQKPA

SEQ ID NO: 1283 - protein, 16 aa, synthetic construct
TNNISVYPAEVVQKTA

SEQ ID NO: 1284 - protein, 16 aa, synthetic construct
TNNQSSYPAPVVQKTA

SEQ ID NO: 1285 - protein, 16 aa, synthetic construct
TNTQSSYPAEVVQKTA

SEQ ID NO: 1286 - protein, 16 aa, synthetic construct
TNNQSSYPQSVVQKTA

SEQ ID NO: 1287 - protein, 16 aa, synthetic construct
TNNSSVYPAEVVQKPA

SEQ ID NO: 1288 - protein, 16 aa, synthetic construct
TNNQSSYPANQSQKTA

SEQ ID NO: 1289 - protein, 16 aa, synthetic construct
TNNLAVYPAEVVQKTA

SEQ ID NO: 1290 - protein, 16 aa, synthetic construct
TNNPSRYPAEVVQKTA

SEQ ID NO: 1291 - protein, 16 aa, synthetic construct
TNTTSSYPAEVVQKPA

SEQ ID NO: 1292 - protein, 16 aa, synthetic construct
TNNQSSYPTNTVQKTA

SEQ ID NO: 1293 - protein, 16 aa, synthetic construct
TNNTGLYPAEVVQKTA

SEQ ID NO: 1294 - protein, 16 aa, synthetic construct
TLLNSSYPAEVVQKTA

SEQ ID NO: 1295 - protein, 16 aa, synthetic construct
TNNSALYPAEVVQKTA

SEQ ID NO: 1296 - protein, 16 aa, synthetic construct
TNNLSLYPAEVVQKTA

SEQ ID NO: 1297 - protein, 16 aa, synthetic construct
TNNQSSYPAEVKSRTA

SEQ ID NO: 1298 - protein, 16 aa, synthetic construct
TNNQSTATAEVVQKTA

SEQ ID NO: 1299 - protein, 16 aa, synthetic construct
TNNQSSYPRDLVQKTA

SEQ ID NO: 1300 - protein, 16 aa, synthetic construct
TNNQSSYPPSLVQKTA

SEQ ID NO: 1301 - protein, 16 aa, synthetic construct
TNSVSSYPAEVVQNTA

SEQ ID NO: 1302 - protein, 16 aa, synthetic construct
TNNTAMYPAEVVQKTA

SEQ ID NO: 1303 - protein, 16 aa, synthetic construct
TNNQGAYPAEVVQKTA

SEQ ID NO: 1304 - protein, 16 aa, synthetic construct
TNNQSSYPPTVVQKTA

SEQ ID NO: 1305 - protein, 16 aa, synthetic construct
TNNSAKYPAEVVQKTA

SEQ ID NO: 1306 - protein, 16 aa, synthetic construct
TNNQSLYPAEVVQKTA

SEQ ID NO: 1307 - protein, 16 aa, synthetic construct
TNNVSSYPAEVVQKPA

SEQ ID NO: 1308 - protein, 16 aa, synthetic construct
TNNLAPYPAEVVQKTA

SEQ ID NO: 1309 - protein, 16 aa, synthetic construct
TNSPSSYPAEVVQKTA

SEQ ID NO: 1310 - protein, 16 aa, synthetic construct
TNNHSSYPAEVVQKTA

SEQ ID NO: 1311 - protein, 16 aa, synthetic construct
TNNQSSYPAPVIQKTA

SEQ ID NO: 1312 - protein, 16 aa, synthetic construct
TNNLSLYPAEVVQKPA

SEQ ID NO: 1313 - protein, 16 aa, synthetic construct
TNNVSKYPAEVVQKTA

SEQ ID NO: 1314 - protein, 16 aa, synthetic construct
TNNQSYNPAEVVQKTA

SEQ ID NO: 1315 - protein, 16 aa, synthetic construct
TNNPSVYPAEVVQKTA

SEQ ID NO: 1316 - protein, 16 aa, synthetic construct
TNNIAPYPAEVVQKTA

SEQ ID NO: 1317 - protein, 16 aa, synthetic construct
TNNQLTTPAEVVQKTA

SEQ ID NO: 1318 - protein, 16 aa, synthetic construct
TNNLGKYPAEVVQKTA

SEQ ID NO: 1319 - protein, 16 aa, synthetic construct
TNNQSSYPAHLIQKTA

SEQ ID NO: 1320 - protein, 16 aa, synthetic construct
TNNMSTYPAEVVQKTA

SEQ ID NO: 1321 - protein, 16 aa, synthetic construct
TNNQSSYPASVIQKTA

SEQ ID NO: 1322 - protein, 16 aa, synthetic construct
TNNQSSYPAEVESKLA

SEQ ID NO: 1323 - protein, 16 aa, synthetic construct
TNSVSSYPAEVVKKTA

SEQ ID NO: 1324 - protein, 16 aa, synthetic construct
TNNVSPYPAEVVQKTA

SEQ ID NO: 1325 - protein, 16 aa, synthetic construct
TNNQSSYPPNMVQKTA

SEQ ID NO: 1326 - protein, 16 aa, synthetic construct
TNNQSSYPANQTQKTA

SEQ ID NO: 1327 - protein, 16 aa, synthetic construct
TNNQSRYPAEVVQKTA

SEQ ID NO: 1328 - protein, 16 aa, synthetic construct
TNTQASYPAEVVQKTA

SEQ ID NO: 1329 - protein, 16 aa, synthetic construct
TNNQSSYPMPLVQKTA

SEQ ID NO: 1330 - protein, 16 aa, synthetic construct
TNNQSSYPREVVQKTA

SEQ ID NO: 1331 - protein, 16 aa, synthetic construct
TNNSSSYPAEVVKKTA

SEQ ID NO: 1332 - protein, 16 aa, synthetic construct
TNNQSSYPAPLQQKTA

SEQ ID NO: 1333 - protein, 16 aa, synthetic construct
TNLSGSYPAEVVQKTA

SEQ ID NO: 1334 - protein, 16 aa, synthetic construct
TNNKSMYPAEVVQKTA

SEQ ID NO: 1335 - protein, 16 aa, synthetic construct
TNNQSSYPVTVVQKTA

SEQ ID NO: 1336 - protein, 16 aa, synthetic construct
TNKQSSYPASVVQKTA

SEQ ID NO: 1337 - protein, 16 aa, synthetic construct
TNNLSYYPAEVVQKTA

SEQ ID NO: 1338 - protein, 16 aa, synthetic construct
TNNSSLYPAEVVQKTA

SEQ ID NO: 1339 - protein, 16 aa, synthetic construct
TNNQSSYPPNTVQKTA

SEQ ID NO: 1340 - protein, 16 aa, synthetic construct
TNNQSSYPALVIQKTA

SEQ ID NO: 1341 - protein, 16 aa, synthetic construct
TNNQGVYPAEVVQKTA

SEQ ID NO: 1342 - protein, 16 aa, synthetic construct
TNNQSRYPAEEVQKTA

SEQ ID NO: 1343 - protein, 16 aa, synthetic construct
TNNQSSYPPHVVQKTA

SEQ ID NO: 1344 - protein, 16 aa, synthetic construct
TNVVSSYPAEVVQKTA

SEQ ID NO: 1345 - protein, 16 aa, synthetic construct
TNNQGTIPAEVVQKTA

SEQ ID NO: 1346 - protein, 16 aa, synthetic construct
TNNQSSYPATLVQKTA

SEQ ID NO: 1347 - protein, 16 aa, synthetic construct
TNNLSSYPAEVVQKTA

SEQ ID NO: 1348 - protein, 16 aa, synthetic construct
TTLTSSYPAEVVQKTA

SEQ ID NO: 1349 - protein, 16 aa, synthetic construct
TNLGGSYPAEVVQKTA

SEQ ID NO: 1350 - protein, 16 aa, synthetic construct
TNNQSSYPAEVVNKLA

SEQ ID NO: 1351 - protein, 16 aa, synthetic construct
TNNVGLYPAEVVQKTA

SEQ ID NO: 1352 - protein, 16 aa, synthetic construct
TNNQSTPPAEVVQKTA

SEQ ID NO: 1353 - protein, 16 aa, synthetic construct
TNNSTIYPAEVVQKTA

SEQ ID NO: 1354 - protein, 16 aa, synthetic construct
TNNSAMYPAEVVQKTA

SEQ ID NO: 1355 - protein, 16 aa, synthetic construct
TNTISSYPAEVVQKTA

SEQ ID NO: 1356 - protein, 16 aa, synthetic construct
TNNQSSYPAALIQKTA

SEQ ID NO: 1357 - protein, 16 aa, synthetic construct
TNLGSSYPAEVVQKTA

SEQ ID NO: 1358 - protein, 16 aa, synthetic construct
TNKMSSYPAEVVQKTA

SEQ ID NO: 1359 - protein, 16 aa, synthetic construct
TNNQSSYPAEEVQKLK

SEQ ID NO: 1360 - protein, 16 aa, synthetic construct
NNNQSSYPASVVQKTA

SEQ ID NO: 1361 - protein, 16 aa, synthetic construct
TNNISPYPAEVVQKTA

SEQ ID NO: 1362 - protein, 16 aa, synthetic construct
TNNQSSYPPPVVQKTA

SEQ ID NO: 1363 - protein, 16 aa, synthetic construct
TNSVASYPAEVVQKTA

SEQ ID NO: 1364 - protein, 16 aa, synthetic construct
TNNQSSYPAEVIRKTA

SEQ ID NO: 1365 - protein, 16 aa, synthetic construct
TNNSSKYPAEVVQKTA

SEQ ID NO: 1366 - protein, 16 aa, synthetic construct
TNNMALYPAEVVQKTA

SEQ ID NO: 1367 - protein, 16 aa, synthetic construct
TNKLSSYPAEVVQKTA

SEQ ID NO: 1368 - protein, 16 aa, synthetic construct
TNNQSSYPAPVVQKPA

SEQ ID NO: 1369 - protein, 16 aa, synthetic construct
TNNQSSSVAEVVQKTA

SEQ ID NO: 1370 - protein, 16 aa, synthetic construct
TNSIWSYPAEVVQKTA

SEQ ID NO: 1371 - protein, 16 aa, synthetic construct
TNNQRSYPATLVQKTA

SEQ ID NO: 1372 - protein, 16 aa, synthetic construct
TNNQSSRDAEVVQKTA

SEQ ID NO: 1373 - protein, 16 aa, synthetic construct
TNKVTSYPAEVVQKTA

SEQ ID NO: 1374 - protein, 16 aa, synthetic construct
TNNQAYYPAEVVQKTA

SEQ ID NO: 1375 - protein, 16 aa, synthetic construct
TNNQSSYPATVVQKTA

SEQ ID NO: 1376 - protein, 16 aa, synthetic construct
TNNQSGISAEVVQKTA

SEQ ID NO: 1377 - protein, 16 aa, synthetic construct
TNNLALYPAEVVQKTA

SEQ ID NO: 1378 - protein, 16 aa, synthetic construct
TNNQAVYPAEVVQKTA

SEQ ID NO: 1379 - protein, 16 aa, synthetic construct
TNNQSSNQAEVVQKTA

SEQ ID NO: 1380 - protein, 16 aa, synthetic construct
TNNMSRYPAEVEQKTA

SEQ ID NO: 1381 - protein, 16 aa, synthetic construct
TKTLSSYPAEVVQKTA

SEQ ID NO: 1382 - protein, 16 aa, synthetic construct
TNNAWSYPAEVVQKTA

SEQ ID NO: 1383 - skipped

SEQ ID NO: 1384 - protein, 16 aa, synthetic construct
TNNQSSYPASMSQKTA

SEQ ID NO: 1385 - protein, 16 aa, synthetic construct
TNLTPSYPAEVVQKTA

SEQ ID NO: 1386 - protein, 16 aa, synthetic construct
TNLTSSYPAEVVQKTA

SEQ ID NO: 1387 - protein, 16 aa, synthetic construct
TNNLSSYPAEVEQKTA

SEQ ID NO: 1388 - protein, 16 aa, synthetic construct
TNNQSNVTAEVVQKTA

SEQ ID NO: 1389 - protein, 16 aa, synthetic construct
TNNQSSYPPQVVQKTA

SEQ ID NO: 1390 - protein, 16 aa, synthetic construct
TNNQSSVSAEVVQKTA

SEQ ID NO: 1391 - protein, 16 aa, synthetic construct
TNNQSSYPPNTVQKPA

SEQ ID NO: 1392 - protein, 16 aa, synthetic construct
TNLESSYPAEVVQKTA

SEQ ID NO: 1393 - skipped

SEQ ID NO: 1394 - protein, 16 aa, synthetic construct
TNMVASYPAEVVQKTA

SEQ ID NO: 1395 - protein, 16 aa, synthetic construct
TNNQSSTPSEVVQKTA

SEQ ID NO: 1396 - protein, 16 aa, synthetic construct
TNNLSSYPAEVVQKPA

SEQ ID NO: 1397 - protein, 16 aa, synthetic construct
TNNQSPPRAEVVQKTA

SEQ ID NO: 1398 - protein, 16 aa, synthetic construct
TNSLGSYPAEVVQKTA

SEQ ID NO: 1399 - protein, 16 aa, synthetic construct
TNSTWSYPAEVVQKPA

SEQ ID NO: 1400 - protein, 16 aa, synthetic construct
TNNQSSYPASVVQKPA

SEQ ID NO: 1401 - protein, 16 aa, synthetic construct
TNNQSSYPAEVASKTA

SEQ ID NO: 1402 - protein, 16 aa, synthetic construct
TNNQSSYPAEVLHKTA

SEQ ID NO: 1403 - protein, 16 aa, synthetic construct
TNTQSSYPASVVQKTA

SEQ ID NO: 1404 - protein, 16 aa, synthetic construct
TNNQSSYPPSVEQKTA

SEQ ID NO: 1405 - protein, 16 aa, synthetic construct
TNNQRSYPPSVVQKTA

SEQ ID NO: 1406 - skipped

SEQ ID NO: 1407 - protein, 16 aa, synthetic construct
TNNQSSYPAELVNKTA

SEQ ID NO: 1408 - protein, 16 aa, synthetic construct
TNNLSGYPAEVVQKTA

SEQ ID NO: 1409 - protein, 16 aa, synthetic construct
TNNQSSYPAEVVSKTA

SEQ ID NO: 1410 - protein, 16 aa, synthetic construct
TNTVSSYTAEVVQKTA

SEQ ID NO: 1411 - protein, 16 aa, synthetic construct
TNSTSSYPAEVVQKPA

SEQ ID NO: 1412 - protein, 16 aa, synthetic construct
TNNTSHYPAEEVQKTA

SEQ ID NO: 1413 - protein, 16 aa, synthetic construct
TNNPSIYPAEVVQKTA

SEQ ID NO: 1414 - protein, 16 aa, synthetic construct
TNTMSSYPAEVVQKTA

SEQ ID NO: 1415 - protein, 16 aa, synthetic construct
TNNQSHNPAEVVQKTA

SEQ ID NO: 1416 - protein, 16 aa, synthetic construct
TNNQSSYPAELIHKTA

SEQ ID NO: 1417 - protein, 16 aa, synthetic construct
TNNQSSYPPSVVQKTA

SEQ ID NO: 1418 - protein, 16 aa, synthetic construct
TNNQSFYPAEVVQKTA

SEQ ID NO: 1419 - protein, 16 aa, synthetic construct
TNNSSSYPAEVVQQTA

SEQ ID NO: 1420 - protein, 16 aa, synthetic construct
TNTVSSYPAEVVQKTA

SEQ ID NO: 1421 - protein, 16 aa, synthetic construct
TNNQSPPSAEVVQKTA

SEQ ID NO: 1422 - protein, 16 aa, synthetic construct
TNNQSTAPAEVVQKTA

SEQ ID NO: 1423 - protein, 16 aa, synthetic construct
TNNQSSYPAEVVHKTA

SEQ ID NO: 1424 - protein, 16 aa, synthetic construct
TNNQSSYPAMVVQKTA

SEQ ID NO: 1425 - protein, 16 aa, synthetic construct
TNNQATNPAEVVQKTA

SEQ ID NO: 1426 - protein, 16 aa, synthetic construct
TNNVSSYQAEVVQKTA

SEQ ID NO: 1427 - protein, 16 aa, synthetic construct
TNHVSSYPAEVVQKTA

SEQ ID NO: 1428 - protein, 16 aa, synthetic construct
TNNVSWYPAEVVQKTA

SEQ ID NO: 1429 - protein, 16 aa, synthetic construct
TNSLSSYPAEVVQKTA

SEQ ID NO: 1430 - protein, 16 aa, synthetic construct
TNSVYSYPAEVVQKTA

SEQ ID NO: 1431 - protein, 16 aa, synthetic construct
TNHTSSYPAEVVQKTA

SEQ ID NO: 1432 - protein, 16 aa, synthetic construct
TNNQSSYPAPLVQKPA

SEQ ID NO: 1433 - protein, 16 aa, synthetic construct
TNSTTSYPAEVVQKTA

SEQ ID NO: 1434 - protein, 16 aa, synthetic construct
TNNQSSYPAEVGSKLA

SEQ ID NO: 1435 - protein, 16 aa, synthetic construct
TNNQSSYPVNTVQKTA

SEQ ID NO: 1436 - protein, 16 aa, synthetic construct
TNNQSQSPAEVVQKTA

SEQ ID NO: 1437 - protein, 16 aa, synthetic construct
TNNQSSYPPPLVQKTA

SEQ ID NO: 1438 - protein, 16 aa, synthetic construct
TNNTSGYPAEVVQKPA

SEQ ID NO: 1439 - protein, 16 aa, synthetic construct
TNFSSSYPAEVVQKTA

SEQ ID NO: 1440 - protein, 16 aa, synthetic construct
TNGVYSYPAEVVQKTA

SEQ ID NO: 1441 - protein, 16 aa, synthetic construct
TNNQSSYPAPVVQQTA

SEQ ID NO: 1442 - protein, 16 aa, synthetic construct
TNSLFSYPAEVVQKTA

SEQ ID NO: 1443 - protein, 16 aa, synthetic construct
TNNQSSYPAEVIKKTA

SEQ ID NO: 1444 - protein, 16 aa, synthetic construct
TNNQSSYPASMIQKTA

SEQ ID NO: 1445 - protein, 16 aa, synthetic construct
TNNSVSYPAEVVQKTA

SEQ ID NO: 1446 - protein, 16 aa, synthetic construct
TNFVSSYPAEVVQKTA

SEQ ID NO: 1447 - protein, 16 aa, synthetic construct
TNLISSYPAEVVQKTA

SEQ ID NO: 1448 - protein, 16 aa, synthetic construct
TNNSAVYPAEVVQKTA

SEQ ID NO: 1449 - protein, 16 aa, synthetic construct
TLSASSYPAEVVQKTA

SEQ ID NO: 1450 - protein, 16 aa, synthetic construct
TNAVSSYPAEVVQKTA

SEQ ID NO: 1451 - protein, 16 aa, synthetic construct
TNNQSSTLIEVVQKTA

SEQ ID NO: 1452 - protein, 16 aa, synthetic construct
TNNQSAYPAEVVQKTA

SEQ ID NO: 1453 - protein, 16 aa, synthetic construct
TNNQSKYPAEVVHKTA

SEQ ID NO: 1454 - protein, 16 aa, synthetic construct
TNNLSIYPAEVVQKPA

SEQ ID NO: 1455 - protein, 16 aa, synthetic construct
TNPISSYPAEVVQKTA

SEQ ID NO: 1456 - protein, 16 aa, synthetic construct
TNNQSSYPVAVVQKTA

SEQ ID NO: 1457 - protein, 16 aa, synthetic construct
TNNSNMYPAEVVQKTA

SEQ ID NO: 1458 - protein, 16 aa, synthetic construct
TNNSNSYPAEVVQKTA

SEQ ID NO: 1459 - protein, 16 aa, synthetic construct
TNNSSPYPAEVVQKTA

SEQ ID NO: 1460 - protein, 16 aa, synthetic construct
SLVQSSYPAEVVQKTA

SEQ ID NO: 1461 - protein, 16 aa, synthetic construct
TNNQSSYPAELKSKTA

SEQ ID NO: 1462 - protein, 16 aa, synthetic construct
TNSISSYTAEVVQKTA

SEQ ID NO: 1463 - protein, 16 aa, synthetic construct
TNNQSSYPTNSVQKTA

SEQ ID NO: 1464 - protein, 16 aa, synthetic construct
TNNSSQYPAEVVQKTA

SEQ ID NO: 1465 - protein, 16 aa, synthetic construct
TSLQSSYPAEVVQKTA

SEQ ID NO: 1466 - protein, 16 aa, synthetic construct
TNNQSPYPAEVVQKTA

SEQ ID NO: 1467 - protein, 16 aa, synthetic construct
TNNQSYYPASVVQKTA

SEQ ID NO: 1468 - protein, 16 aa, synthetic construct
TNNLSAYTAEVVQKTA

SEQ ID NO: 1469 - protein, 16 aa, synthetic construct
TNNVSAYPAEVVQKTA

SEQ ID NO: 1470 - protein, 16 aa, synthetic construct
TNTVSSYPAEVVQKPA

SEQ ID NO: 1471 - protein, 16 aa, synthetic construct
TNNNSVYPAEVVQKTA

SEQ ID NO: 1472 - protein, 16 aa, synthetic construct
TNNQSSYPAPLVQKTA

SEQ ID NO: 1473 - protein, 16 aa, synthetic construct
TNNQNSPPAEVVQKTA

SEQ ID NO: 1474 - protein, 16 aa, synthetic construct
TNSVVSYPAEVVQKTA

SEQ ID NO: 1475 - protein, 16 aa, synthetic construct
TNNISKYPAEVVQKTA

SEQ ID NO: 1476 - protein, 16 aa, synthetic construct
TNSPFSYPAEVVQKTA

SEQ ID NO: 1477 - protein, 16 aa, synthetic construct
TNNQSSYPAELLSKTA

SEQ ID NO: 1478 - protein, 16 aa, synthetic construct
TNNQSSTRSEVVQKTA

SEQ ID NO: 1479 - protein, 16 aa, synthetic construct
TNMVSSYPAEVVQKTA

SEQ ID NO: 1480 - protein, 16 aa, synthetic construct
TNNQLPIPAEVVQKTA

SEQ ID NO: 1481 - protein, 16 aa, synthetic construct
TNNTSMYPAEVVQKTA

SEQ ID NO: 1482 - protein, 16 aa, synthetic construct
TNNQSSYPSTVVQKTA

SEQ ID NO: 1483 - protein, 16 aa, synthetic construct
TNNQSSYPATVVKKTA

SEQ ID NO: 1484 - protein, 16 aa, synthetic construct
TNNQSSLTAEVVQKTA

SEQ ID NO: 1485 - protein, 16 aa, synthetic construct
TNNQSSYPPSVVQKPA

SEQ ID NO: 1486 - protein, 16 aa, synthetic construct
TNNVTKYPAEVVQKTA

SEQ ID NO: 1487 - protein, 16 aa, synthetic construct
TNNQSSYPPNVVQKTA

SEQ ID NO: 1488 - protein, 16 aa, synthetic construct
TNNQSSYPAELMSKTA

SEQ ID NO: 1489 - protein, 16 aa, synthetic construct
TNALSSYPAEVVQKTA

SEQ ID NO: 1490 - protein, 16 aa, synthetic construct
TNNQSSYPANVVQKTA

SEQ ID NO: 1491 - protein, 16 aa, synthetic construct
TNNSALYPAEVVQKPA

SEQ ID NO: 1492 - protein, 16 aa, synthetic construct
TVTQSSYPAEVVQKTA

SEQ ID NO: 1493 - protein, 16 aa, synthetic construct
TNNQSSVTLEVVQKTA

SEQ ID NO: 1494 - protein, 16 aa, synthetic construct
TNNVSVYPAEVVQKTA

SEQ ID NO: 1495 - protein, 16 aa, synthetic construct
TNNQSSYPQELVQKTA

SEQ ID NO: 1496 - protein, 16 aa, synthetic construct
TNNQSSYPASVNQKTA

SEQ ID NO: 1497 - protein, 16 aa, synthetic construct
TNNQSSYPASIIQKTA

SEQ ID NO: 1498 - protein, 16 aa, synthetic construct
TNNQSSYPAPVVKKTA

SEQ ID NO: 1499 - protein, 16 aa, synthetic construct
TNNLAFYPAEVVQKTA

SEQ ID NO: 1500 - protein, 16 aa, synthetic construct
TNNQSSYPAEAVSKTA

SEQ ID NO: 1501 - protein, 16 aa, synthetic construct
TNNQSSYPAPLEQKTA

SEQ ID NO: 1502 - protein, 16 aa, synthetic construct
TNNLSKYPAEVVQKTD

SEQ ID NO: 1503 - protein, 16 aa, synthetic construct
TNNQSSYPAPLIQKTA

SEQ ID NO: 1504 - protein, 16 aa, synthetic construct
TNTLASYPAEVVQKTA

SEQ ID NO: 1505 - protein, 16 aa, synthetic construct
TNNQSSYPPGVVQKTA

SEQ ID NO: 1506 - protein, 16 aa, synthetic construct
TNNQSTQRAEVVQKTA

SEQ ID NO: 1507 - protein, 16 aa, synthetic construct
TNNLSRYTAEVVQKTA

SEQ ID NO: 1508 - protein, 16 aa, synthetic construct
TNTVSSYPAEEVQKTA

SEQ ID NO: 1509 - protein, 16 aa, synthetic construct
TNNQSSVAAEVVQKTA

SEQ ID NO: 1510 - protein, 16 aa, synthetic construct
TNNHSRYPAEVVQKTA

SEQ ID NO: 1511 - protein, 16 aa, synthetic construct
TNNQSSYPPAVVQKTA

SEQ ID NO: 1512 - protein, 16 aa, synthetic construct
TNNVSRYPAEVVQKTA

SEQ ID NO: 1513 - protein, 16 aa, synthetic construct
TNKQSSYPAPVVQKTA

SEQ ID NO: 1514 - protein, 16 aa, synthetic construct
TNNQSSYPAEVSSKTA

SEQ ID NO: 1515 - protein, 16 aa, synthetic construct
TNNSSHYPAEVVQKTA

SEQ ID NO: 1516 - protein, 16 aa, synthetic construct
TNNSPSYPAEVVQKTA

SEQ ID NO: 1517 - protein, 16 aa, synthetic construct
TNNQSSYPSTIVQKTA

SEQ ID NO: 1518 - protein, 16 aa, synthetic construct
TNATSSYPAEVVQKTA

SEQ ID NO: 1519 - protein, 16 aa, synthetic construct
TNVSLSYPAEVVQKTA

SEQ ID NO: 1520 - protein, 16 aa, synthetic construct
TNNQSSYPASMVQKTA

SEQ ID NO: 1521 - protein, 16 aa, synthetic construct
TNLVSSYPAEVLQKTA

SEQ ID NO: 1522 - protein, 16 aa, synthetic construct
TNNQSSLNAEVVQKTA

SEQ ID NO: 1523 - protein, 16 aa, synthetic construct
TNNPSKYPAEVVQKTA

SEQ ID NO: 1524 - protein, 16 aa, synthetic construct
TNNQSSYPASIVQKTA

SEQ ID NO: 1525 - protein, 16 aa, synthetic construct
TNNTVSYPAEVVQKTA

SEQ ID NO: 1526 - protein, 16 aa, synthetic construct
TNNVALYPAEVVQKTA

SEQ ID NO: 1527 - protein, 16 aa, synthetic construct
TNNQSSYPPVVVQKTA

SEQ ID NO: 1528 - protein, 16 aa, synthetic construct
TNNQSSYPSSVVKKTA

SEQ ID NO: 1529 - protein, 16 aa, synthetic construct
TNNQSSYPAEVLKKTA

SEQ ID NO: 1530 - protein, 16 aa, synthetic construct
TNNQSTLTAEVVQKTA

SEQ ID NO: 1531 - protein, 16 aa, synthetic construct
TNNQSSYPAPLVQQTA

SEQ ID NO: 1532 - protein, 16 aa, synthetic construct
TNNLSPYPAEVVQKTA

SEQ ID NO: 1533 - protein, 16 aa, synthetic construct
TNNQSSYPAEVVQKTA

SEQ ID NO: 1534 - protein, 16 aa, synthetic construct
TNNQLTSPAEVVQKTA

SEQ ID NO: 1535 - protein, 16 aa, synthetic construct
TNNLSHYPAEVVQKTA

SEQ ID NO: 1536 - skipped

SEQ ID NO: 1537 - protein, 16 aa, synthetic construct
TNSVSSYPAEVVQKTA

SEQ ID NO: 1538 - protein, 16 aa, synthetic construct
TNNQSKYPAEVVQKTA

SEQ ID NO: 1539 - protein, 16 aa, synthetic construct
TNNSSSYPAEVVQKTA

SEQ ID NO: 1540 - protein, 16 aa, synthetic construct
TNNQSSYPATVVQKTA

SEQ ID NO: 1541 - protein, 16 aa, synthetic construct
TNNSGSYPAEVVQKTA

SEQ ID NO: 1542 - protein, 16 aa, synthetic construct
TNNLSKYPAEVVQKTA

SEQ ID NO: 1543 - protein, 16 aa, synthetic construct
TNNQSSYPASVVQKTA

SEQ ID NO: 1544 - protein, 16 aa, synthetic construct
TNNMSRYPAEVVQKTA

SEQ ID NO: 1545 - protein, 16 aa, synthetic construct
TNNLSRYPAEVVQKTA

SEQ ID NO: 1546 - protein, 16 aa, synthetic construct
TNNQSSYPPSIVQKTA

SEQ ID NO: 1547 - protein, 16 aa, synthetic construct
TNNASKYPAEVVQKTA

SEQ ID NO: 1548 - protein, 16 aa, synthetic construct
TNNQSSYPPSVVQKTA

SEQ ID NO: 1549 - protein, 16 aa, synthetic construct
TNNLSSYPAEVVQKTA

SEQ ID NO: 1550 - protein, 16 aa, synthetic construct
TNNQSSYPATLVQKTA

SEQ ID NO: 1551 - protein, 16 aa, synthetic construct
TNSLSSYPAEVVQKTA

SEQ ID NO: 1552 - protein, 16 aa, synthetic construct
TNQVSSYPAEVVQKTA

SEQ ID NO: 1553 - protein, 16 aa, synthetic construct
TNNVSLYPAEVVQKTA

SEQ ID NO: 1554 - protein, 16 aa, synthetic construct
TNNQSSYPVTVVQKTA

SEQ ID NO: 1555 - protein, 16 aa, synthetic construct
TNNTSTYPAEVVQKTA

SEQ ID NO: 1556 - protein, 16 aa, synthetic construct
TNNQSSLTAEVVQKTA

SEQ ID NO: 1557 - skipped

SEQ ID NO: 1558 - protein, 16 aa, synthetic construct
TNNQSSYPAPVVQKTA

SEQ ID NO: 1559 - protein, 16 aa, synthetic construct
TNNQSSYPASLIQKTA

SEQ ID NO: 1560 - protein, 16 aa, synthetic construct
TNTISSYPAEVVQKTA

SEQ ID NO: 1561 - protein, 16 aa, synthetic construct
TNNQSSYPAPLQQKTA

SEQ ID NO: 1562 - protein, 16 aa, synthetic construct
TNNQSSYPAPLVQKTA

SEQ ID NO: 1563 - skipped

SEQ ID NO: 1564 - protein, 16 aa, synthetic construct
TNNPSRYPAEVVQKTA

SEQ ID NO: 1565 - skipped

SEQ ID NO: 1566 - protein, 16 aa, synthetic construct
TNNSARYPAEVVQKTA

SEQ ID NO: 1567-1574 - skipped (8 entries)

SEQ ID NO: 1575 - protein, 16 aa, synthetic construct
TNTASSYPAEVVQKTA

SEQ ID NO: 1576-1577 - skipped (2 entries)

SEQ ID NO: 1578 - protein, 16 aa, synthetic construct
TNNQSTNKAEVVQKTA

SEQ ID NO: 1579-1582 - skipped (4 entries)

SEQ ID NO: 1583 - protein, 16 aa, synthetic construct
TNNTSLYPAEEVQKTA

SEQ ID NO: 1584 - protein, 16 aa, synthetic construct
TNTASSYQAEVVQKTA

SEQ ID NO: 1585 - protein, 16 aa, synthetic construct
TNNQSSYTPSLVQKTA

SEQ ID NO: 1586 - protein, 16 aa, synthetic construct
TNNQASYPAEVVQKTA

SEQ ID NO: 1587 - protein, 16 aa, synthetic construct
TNKQASYPAEVVQKTA

SEQ ID NO: 1588-1589 - skipped (2 entries)

SEQ ID NO: 1590 - protein, 16 aa, synthetic construct
TNNQSSYPPSLEQKTA

SEQ ID NO: 1591 - protein, 16 aa, synthetic construct
TNNQSSYPPSLVKKTA

SEQ ID NO: 1592 - protein, 16 aa, synthetic construct
TNNLSSYQAEVVQKTA

SEQ ID NO: 1593 - protein, 16 aa, synthetic construct
TNNQSSYPPSLVQKPA

SEQ ID NO: 1594 - skipped

SEQ ID NO: 1595 - protein, 8 aa, synthetic construct
KFAAVPGI

SEQ ID NO: 1596 - protein, 8 aa, synthetic construct
LSSKVTDS

SEQ ID NO: 1597 - skipped

SEQ ID NO: 1598 - protein, 16 aa, synthetic construct
TNNHSSYPAAVVQKTA

SEQ ID NO: 1599 - protein, 16 aa, synthetic construct
TNSQSSNPAEVVQKTA

SEQ ID NO: 1600 - skipped

SEQ ID NO: 1601 - protein, 16 aa, synthetic construct
NNNQSRYPAEVVQKTA

SEQ ID NO: 1602 - protein, 16 aa, synthetic construct
TNNQSSYTAEVVQKNA

SEQ ID NO: 1603 - protein, 16 aa, synthetic construct
TNNTSLCPAEVVQKTA

SEQ ID NO: 1604 - protein, 16 aa, synthetic construct
TNNQRSYTAEVVQKTA

SEQ ID NO: 1605 - protein, 16 aa, synthetic construct
TNSTSLYPAEVVQKTA

SEQ ID NO: 1606 - protein, 16 aa, synthetic construct
TNNQSSYTAEVVKKTA

SEQ ID NO: 1607 - protein, 16 aa, synthetic construct
TNNHSSYPAEVLQKTA

SEQ ID NO: 1608 - protein, 16 aa, synthetic construct
TNNQSSYQAEEVQKTA

SEQ ID NO: 1609 - skipped

SEQ ID NO: 1610 - protein, 16 aa, synthetic construct
TNNKSKYPAEVVQKTA

SEQ ID NO: 1611 - protein, 16 aa, synthetic construct
TNNQSRYPAEVMQKTA

SEQ ID NO: 1612 - protein, 16 aa, synthetic construct
TNSTSPYPAEVVQKTA

SEQ ID NO: 1613 - protein, 16 aa, synthetic construct
TNNQSSYPAWLIQKTA

SEQ ID NO: 1614 - protein, 16 aa, synthetic construct
TNNQSSYPAEATKKTA

SEQ ID NO: 1615 - protein, 16 aa, synthetic construct
TNKQSSYTAEVVQKTA

SEQ ID NO: 1616 - protein, 16 aa, synthetic construct
TNKIGSYPAEVVQKTA

SEQ ID NO: 1617 - protein, 16 aa, synthetic construct
TNNKSRYPAEVVQKTA

SEQ ID NO: 1618 - protein, 16 aa, synthetic construct
TNNQSSYPAEVVQKTD

SEQ ID NO: 1619 - protein, 16 aa, synthetic construct
TNNQSSYPAEVVQKNA

SEQ ID NO: 1620 - protein, 16 aa, synthetic construct
TNNQRKYPAEVVQKTA

SEQ ID NO: 1621 - protein, 16 aa, synthetic construct
TNNQSSNPAEEVQKTA

SEQ ID NO: 1622 - protein, 16 aa, synthetic construct
NNNQSSYPAEVVQKTA

SEQ ID NO: 1623 - protein, 16 aa, synthetic construct
TNNQSYYPAEEVQKTA

SEQ ID NO: 1624 - protein, 16 aa, synthetic construct
TKNHSSYPAEVVQKTA

SEQ ID NO: 1625 - protein, 16 aa, synthetic construct
TDYHRGDPAKVVQKSA

SEQ ID NO: 1626 - protein, 16 aa, synthetic construct
TNKQKFSLTEELQKNA

SEQ ID NO: 1627 - protein, 16 aa, synthetic construct
GKTPRHFTQQVVQENA

SEQ ID NO: 1628 - protein, 16 aa, synthetic construct
SENERSDTSVVVAQIL

SEQ ID NO: 1629 - protein, 16 aa, synthetic construct
TNNQSSIRLEVVQKTA

SEQ ID NO: 1630 - protein, 16 aa, synthetic construct
TNNQSSSLAEVVQKTA

SEQ ID NO: 1631 - protein, 16 aa, synthetic construct
TNNQSGPTAEVVQKTA

SEQ ID NO: 1632 - protein, 16 aa, synthetic construct
TNNQSSYPAEAPKKTA

SEQ ID NO: 1633 - protein, 16 aa, synthetic construct
TNNQSSYPRKVVQKTA

SEQ ID NO: 1634 - protein, 16 aa, synthetic construct
TNNQSRIQAEVVQKTA

SEQ ID NO: 1635 - protein, 16 aa, synthetic construct
TNNQSWHQAEVVQKTA

SEQ ID NO: 1636 - protein, 16 aa, synthetic construct
NEWQSSYPAEVVQKTA

SEQ ID NO: 1637 - protein, 16 aa, synthetic construct
TNNQSIKWAEVVQKTA

SEQ ID NO: 1638 - protein, 16 aa, synthetic construct
TNNQSSYPAEVVNIQA

SEQ ID NO: 1639 - protein, 16 aa, synthetic construct
TNNQSSYPAHNSQKTA

SEQ ID NO: 1640 - protein, 16 aa, synthetic construct
TNNQSSYPAEVVQYQD

SEQ ID NO: 1641 - protein, 16 aa, synthetic construct
TNNQSSRQQEVVQKTA

SEQ ID NO: 1642 - protein, 16 aa, synthetic construct
TNNQNCSPAEVVQKTA

SEQ ID NO: 1643 - protein, 16 aa, synthetic construct
TNNQSSYPAERSHKTA

SEQ ID NO: 1644 - protein, 16 aa, synthetic construct
TVNRSSYPAEVVQKTA

SEQ ID NO: 1645 - protein, 16 aa, synthetic construct
TNNQHGGPAEVVQKTA

SEQ ID NO: 1646 - protein, 16 aa, synthetic construct
TNNQSMIWAEVVQKTA

SEQ ID NO: 1647 - protein, 16 aa, synthetic construct
TNNQSSYPAEASRKTA

SEQ ID NO: 1648 - protein, 16 aa, synthetic construct
TNNQSSYPAHLTQKTA

SEQ ID NO: 1649 - protein, 16 aa, synthetic construct
TNNRRGYPAEVVQKTA

SEQ ID NO: 1650 - protein, 16 aa, synthetic construct
TNNKRIYPAEVVQKTA

SEQ ID NO: 1651 - protein, 16 aa, synthetic construct
TNNQGALPAEVVQKTA

SEQ ID NO: 1652 - protein, 16 aa, synthetic construct
TNNQSSYPAEASKKTA

SEQ ID NO: 1653 - protein, 16 aa, synthetic construct
TGQHSSYPAEVVQKTA

SEQ ID NO: 1654 - protein, 16 aa, synthetic construct
TNNQSSIVQEVVQKTA

SEQ ID NO: 1655 - protein, 16 aa, synthetic construct
TNNQSSYPAERNTKTA

SEQ ID NO: 1656 - protein, 16 aa, synthetic construct
TNNQSSYPAQALQKTA

SEQ ID NO: 1657 - protein, 16 aa, synthetic construct
TNNQSRRGAEVVQKTA

SEQ ID NO: 1658 - protein, 16 aa, synthetic construct
TNNQSSYPQVMVQKTA

SEQ ID NO: 1659 - protein, 16 aa, synthetic construct
TNNQSSQKREVVQKTA

SEQ ID NO: 1660 - protein, 16 aa, synthetic construct
TNNQSSYPAENARKTA

SEQ ID NO: 1661 - protein, 16 aa, synthetic construct
TNNQSSYPAGTGQKTA

SEQ ID NO: 1662 - protein, 16 aa, synthetic construct
TRMPSSYPAEVVQKTA

SEQ ID NO: 1663 - protein, 16 aa, synthetic construct
TNNQSSPISEVVQKTA

SEQ ID NO: 1664 - protein, 16 aa, synthetic construct
TNNQSSYGAVVVQKTA

SEQ ID NO: 1665 - protein, 16 aa, synthetic construct
TNNQSSYPAEQPVKTA

SEQ ID NO: 1666 - protein, 16 aa, synthetic construct
TNNQSSGYREVVQKTA

SEQ ID NO: 1667 - protein, 16 aa, synthetic construct
TNNQSGAQAEVVQKTA

SEQ ID NO: 1668 - protein, 16 aa, synthetic construct
TNNQSSKGREVVQKTA

SEQ ID NO: 1669 - protein, 16 aa, synthetic construct
TNNQSSYPAESKHKTA

SEQ ID NO: 1670 - protein, 16 aa, synthetic construct
TNNQSSYNMRVVQKTA

SEQ ID NO: 1671 - protein, 16 aa, synthetic construct
TNNQSSYPAEKNTKTA

SEQ ID NO: 1672 - protein, 16 aa, synthetic construct
TNNQSSYPAERREKTA

SEQ ID NO: 1673 - protein, 16 aa, synthetic construct
TNNQWWMPAEVVQKTA

SEQ ID NO: 1674 - protein, 16 aa, synthetic construct
TNNQSYTHAEVVQKTA

SEQ ID NO: 1675 - protein, 16 aa, synthetic construct
TNNAAKYPAEVVQKTA

SEQ ID NO: 1676 - protein, 16 aa, synthetic construct
TNNQSSYPLVCVQKTA

SEQ ID NO: 1677 - protein, 16 aa, synthetic construct
TNNQSNAYAEVVQKTA

SEQ ID NO: 1678 - protein, 16 aa, synthetic construct
TGVKSSYPAEVVQKTA

SEQ ID NO: 1679 - protein, 16 aa, synthetic construct
TNNQSSKKTEVVQKTA

SEQ ID NO: 1680 - protein, 16 aa, synthetic construct
TNNQSSYPAEMANKTA

SEQ ID NO: 1681 - protein, 16 aa, synthetic construct
TNNQSSYPASMGQKTA

SEQ ID NO: 1682 - protein, 16 aa, synthetic construct
TNNQSSYPAPGIQKTA

SEQ ID NO: 1683 - protein, 16 aa, synthetic construct
TNNQSSYPAQDKQKTA

SEQ ID NO: 1684 - protein, 16 aa, synthetic construct
TNNQSSYPERQVQKTA

SEQ ID NO: 1685 - protein, 16 aa, synthetic construct
TNNQSSYPASQSQKPA

SEQ ID NO: 1686 - protein, 16 aa, synthetic construct
TNNQSQGTAEVVQKTA

SEQ ID NO: 1687 - protein, 16 aa, synthetic construct
TNNQPRLPAEVVQKTA

SEQ ID NO: 1688 - protein, 16 aa, synthetic construct
TNNQSSYPAELGKKTA

SEQ ID NO: 1689 - protein, 16 aa, synthetic construct
TNNQSSLTKEVVQKTA

SEQ ID NO: 1690 - protein, 16 aa, synthetic construct
ELCQSSYPAEVVQKTA

SEQ ID NO: 1691 - protein, 16 aa, synthetic construct
TNNQSSYPVSRVQKTA

SEQ ID NO: 1692 - protein, 16 aa, synthetic construct
TNNQSSHHQEVVQKTA

SEQ ID NO: 1693 - protein, 16 aa, synthetic construct
TNNQWCSPAEVVQKTA

SEQ ID NO: 1694 - protein, 16 aa, synthetic construct
TNNQSSYPAEVVQREY

SEQ ID NO: 1695 - protein, 16 aa, synthetic construct
THKSSSYPAEVVQKTA

SEQ ID NO: 1696 - protein, 16 aa, synthetic construct
TGNVSSYPAEVVQKTA

SEQ ID NO: 1697 - protein, 16 aa, synthetic construct
TNNQSSYPTSDVQKTA

SEQ ID NO: 1698 - protein, 16 aa, synthetic construct
TNNQSSYPAINTQKTA

SEQ ID NO: 1699 - protein, 16 aa, synthetic construct
TNAPRSYPAEVVQKTA

SEQ ID NO: 1700 - protein, 16 aa, synthetic construct
TNNQAHNPAEVVQKTA

SEQ ID NO: 1701 - protein, 16 aa, synthetic construct
TNNQSARIAEVVQKTA

SEQ ID NO: 1702 - protein, 16 aa, synthetic construct
TNNQSSIHQEVVQKTA

SEQ ID NO: 1703 - protein, 16 aa, synthetic construct
TNNQSSYPGPKVQKTA

SEQ ID NO: 1704 - protein, 16 aa, synthetic construct
TNNQSSYPASQSQKTA

SEQ ID NO: 1705 - protein, 16 aa, synthetic construct
TNNQSVAKAEVVQKTA

SEQ ID NO: 1706 - protein, 16 aa, synthetic construct
TGLLSSYPAEVVQKTA

SEQ ID NO: 1707 - protein, 16 aa, synthetic construct
TNNQSSYPAEMNKKTA

SEQ ID NO: 1708 - protein, 16 aa, synthetic construct
TNNQSSYPAEVVIRGA

SEQ ID NO: 1709 - protein, 16 aa, synthetic construct
TNNQSSYVLEVVQKTA

SEQ ID NO: 1710 - protein, 16 aa, synthetic construct
TNNQSSYPAERSAKTA

SEQ ID NO: 1711 - protein, 16 aa, synthetic construct
TNNQSSYRTNVVQKTA

SEQ ID NO: 1712 - protein, 16 aa, synthetic construct
TNFTPSYPAEVVQKTA

SEQ ID NO: 1713 - protein, 16 aa, synthetic construct
TNNQSSTTTEVVQKTA

SEQ ID NO: 1714 - protein, 16 aa, synthetic construct
TNNQSFLDAEVVQKTA

SEQ ID NO: 1715 - protein, 16 aa, synthetic construct
TNNQSSYPTSNVQKTA

SEQ ID NO: 1716 - protein, 16 aa, synthetic construct
TNNQSSRHDEVVQKTA

SEQ ID NO: 1717 - protein, 16 aa, synthetic construct
TNNQSSYPQKSVQKTA

SEQ ID NO: 1718 - protein, 16 aa, synthetic construct
TNNQSSYPAERHPKTA

SEQ ID NO: 1719 - protein, 16 aa, synthetic construct
TNNQSSKVQEVVQKTA

SEQ ID NO: 1720 - protein, 16 aa, synthetic construct
LGVQSSYPAEVVQKTA

SEQ ID NO: 1721 - protein, 16 aa, synthetic construct
TNNQSSYPAEARQKTA

SEQ ID NO: 1722 - protein, 16 aa, synthetic construct
TNNQSSYPDSRVQKTA

SEQ ID NO: 1723 - protein, 16 aa, synthetic construct
TNNQSSYPQMDVQKTA

SEQ ID NO: 1724 - protein, 16 aa, synthetic construct
TNNQSVQGAEVVQKTA

SEQ ID NO: 1725 - protein, 16 aa, synthetic construct
TNNQSSYSEAVVQKTA

SEQ ID NO: 1726 - protein, 16 aa, synthetic construct
TNNQSSYTALVSQKTA

SEQ ID NO: 1727 - protein, 16 aa, synthetic construct
TNNQSSYPAEVRAKTA

SEQ ID NO: 1728 - protein, 16 aa, synthetic construct
TNNQSSPGTEVVQKTA

SEQ ID NO: 1729 - protein, 16 aa, synthetic construct
TNNQSMMKAEVVQKTA

SEQ ID NO: 1730 - protein, 16 aa, synthetic construct
TNNQSSYPADNNQKTA

SEQ ID NO: 1731 - protein, 16 aa, synthetic construct
TNNQSSQNLEVVQKTA

SEQ ID NO: 1732 - protein, 16 aa, synthetic construct
TNNKPPYPAEVVQKTA

SEQ ID NO: 1733 - protein, 16 aa, synthetic construct
TNNQSNTYAEVVQKTA

SEQ ID NO: 1734 - protein, 16 aa, synthetic construct
TNNQSSYPAERPGKTA

SEQ ID NO: 1735 - protein, 16 aa, synthetic construct
TNNQSSYPAESVRKTA

SEQ ID NO: 1736 - protein, 16 aa, synthetic construct
TNNQSSYSVGVVQKTA

SEQ ID NO: 1737 - protein, 16 aa, synthetic construct
TNNQSSYPLDRVQKTA

SEQ ID NO: 1738 - protein, 16 aa, synthetic construct
TNNQSQIKAEVVQKTA

SEQ ID NO: 1739 - protein, 16 aa, synthetic construct
TNNQSSNMVEVVQKTA

SEQ ID NO: 1740 - protein, 16 aa, synthetic construct
TNNQSSYSSHVVQKTA

SEQ ID NO: 1741 - protein, 16 aa, synthetic construct
TNNQGSSPAEVVQKTA

SEQ ID NO: 1742 - protein, 16 aa, synthetic construct
TNNQSSKYSEVVQKTA

SEQ ID NO: 1743 - protein, 16 aa, synthetic construct
TNNQSSYPAEARAKTA

SEQ ID NO: 1744 - protein, 16 aa, synthetic construct
TNNQSSYTASLTQKTA

SEQ ID NO: 1745 - protein, 16 aa, synthetic construct
TNNQSSYPAEGPQKTA

SEQ ID NO: 1746 - protein, 16 aa, synthetic construct
TNNQSQPKAEVVQKTA

SEQ ID NO: 1747 - protein, 16 aa, synthetic construct
TNNQSQVIAEVVQKTA

SEQ ID NO: 1748 - protein, 16 aa, synthetic construct
TNNQSSYPAERPNKTA

SEQ ID NO: 1749 - protein, 16 aa, synthetic construct
TNNQSWTVAEVVQKTA

SEQ ID NO: 1750 - protein, 16 aa, synthetic construct
TNNQSRVIAEVVQKTA

SEQ ID NO: 1751 - protein, 16 aa, synthetic construct
TNNQSSYPAEYERKTA

SEQ ID NO: 1752 - protein, 16 aa, synthetic construct
TFHKSSYPAEVVQKTA

SEQ ID NO: 1753 - protein, 16 aa, synthetic construct
TNNQRERPAEVVQKTA

SEQ ID NO: 1754 - protein, 16 aa, synthetic construct
TNNQSSYPAERQGKTA

SEQ ID NO: 1755 - protein, 16 aa, synthetic construct
TNNQSSYPAEMTKKTA

SEQ ID NO: 1756 - protein, 16 aa, synthetic construct
TNNQSWNMAEVVQKTA

SEQ ID NO: 1757 - protein, 16 aa, synthetic construct
TNNQSSLKDEVVQKTA

SEQ ID NO: 1758 - protein, 16 aa, synthetic construct
TNNQSSYPAGPSQKTA

SEQ ID NO: 1759 - protein, 16 aa, synthetic construct
TNNQSSKVNEVVQKTA

SEQ ID NO: 1760 - protein, 16 aa, synthetic construct
TNNQSSYPMRDVQKTA

SEQ ID NO: 1761 - protein, 16 aa, synthetic construct
TNNQSSYPALTNQKTA

SEQ ID NO: 1762 - protein, 16 aa, synthetic construct
TNNQSSNALEVVQKTA

SEQ ID NO: 1763 - protein, 16 aa, synthetic construct
TNNQSSYPAEVVQKSQ

SEQ ID NO: 1764 - protein, 16 aa, synthetic construct
TPYKSSYPAEVVQKTA

SEQ ID NO: 1765 - protein, 16 aa, synthetic construct
TTTPSSYPAEVVQKTA

SEQ ID NO: 1766 - protein, 16 aa, synthetic construct
TNNQSSYKDAVVQKTA

SEQ ID NO: 1767 - protein, 16 aa, synthetic construct
TNNQSSYPAEDTRKTA

SEQ ID NO: 1768 - protein, 16 aa, synthetic construct
TNNQSSYPAERTQKTA

SEQ ID NO: 1769 - protein, 16 aa, synthetic construct
TNNQSSYPAEHAQKTA

SEQ ID NO: 1770 - protein, 16 aa, synthetic construct
TNNQSSYPAASPQKTA

SEQ ID NO: 1771 - protein, 16 aa, synthetic construct
TNNQSSKNREVVQKTA

SEQ ID NO: 1772 - protein, 16 aa, synthetic construct
TNNQSSYPAEVTTKTA

SEQ ID NO: 1773 - protein, 16 aa, synthetic construct
TNNQSSYPAEVVSKQA

SEQ ID NO: 1774 - protein, 16 aa, synthetic construct
TNNQRNQPAEVVQKTA

SEQ ID NO: 1775 - protein, 16 aa, synthetic construct
TNNQSSYPAEKVSKTA

SEQ ID NO: 1776 - protein, 16 aa, synthetic construct
TNNQSSYPAEFTKKTA

SEQ ID NO: 1777 - protein, 16 aa, synthetic construct
TAMDSSYPAEVVQKTA

SEQ ID NO: 1778 - protein, 16 aa, synthetic construct
YLKQSSYPAEVVQKTA

SEQ ID NO: 1779 - protein, 16 aa, synthetic construct
TNNQSSYPAEKLTKTA

SEQ ID NO: 1780 - protein, 16 aa, synthetic construct
TNNQSSYPAEVVNGKA

SEQ ID NO: 1781 - protein, 16 aa, synthetic construct
TNNQSSYPAEKGSKTA

SEQ ID NO: 1782 - protein, 16 aa, synthetic construct
TNNQSSYPAHINQKTA

SEQ ID NO: 1783 - protein, 16 aa, synthetic construct
TNNQSSYPVQNVQKTA

SEQ ID NO: 1784 - protein, 16 aa, synthetic construct
TNNQSSYPKDTVQKTA

SEQ ID NO: 1785 - protein, 16 aa, synthetic construct
TNNQVIWPAEVVQKTA

SEQ ID NO: 1786 - protein, 16 aa, synthetic construct
TNNQSWVAAEVVQKTA

SEQ ID NO: 1787 - protein, 16 aa, synthetic construct
TDGISSYPAEVVQKTA

SEQ ID NO: 1788 - protein, 16 aa, synthetic construct
TNNQSSRNGEVVQKTA

SEQ ID NO: 1789 - protein, 16 aa, synthetic construct
TNNQSSHPAEVVQKTA

SEQ ID NO: 1790 - protein, 16 aa, synthetic construct
TNNQSSMQMEVVQKTA

SEQ ID NO: 1791 - protein, 16 aa, synthetic construct
TNNQSSVSHEVVQKTA

SEQ ID NO: 1792 - protein, 16 aa, synthetic construct
TNNQSSTFTEVVQKTA

SEQ ID NO: 1793 - protein, 16 aa, synthetic construct
TNNQSSYTATASQKTA

SEQ ID NO: 1794 - protein, 16 aa, synthetic construct
TNNQSSYPAESPKKTA

SEQ ID NO: 1795 - protein, 16 aa, synthetic construct
TNNQSSYPAEPRGKTA

SEQ ID NO: 1796 - protein, 16 aa, synthetic construct
TNNQSSIRLEVVQKTA

SEQ ID NO: 1797 - protein, 16 aa, synthetic construct
TNNQSSYPAKDLQKTA

SEQ ID NO: 1798 - protein, 16 aa, synthetic construct
TNNQSSYPAEHVSKTA

SEQ ID NO: 1799 - protein, 16 aa, synthetic construct
TNNQSSYPAEGKAKTA

SEQ ID NO: 1800 - protein, 16 aa, synthetic construct
TNNQSRMKAEVVQKTA

SEQ ID NO: 1801 - protein, 16 aa, synthetic construct
TNNQSWLQAEVVQKTA

SEQ ID NO: 1802 - protein, 16 aa, synthetic construct
TNNQSHDRAEVVQKTA

SEQ ID NO: 1803 - protein, 16 aa, synthetic construct
TNNQSSGSTEVVQKTA

SEQ ID NO: 1804 - protein, 16 aa, synthetic construct
TNNQSSYPAEPAKKTA

SEQ ID NO: 1805 - protein, 16 aa, synthetic construct
TNNQSSYPAERSNKTA

SEQ ID NO: 1806 - protein, 16 aa, synthetic construct
TFNKSSYPAEVVQKTA

SEQ ID NO: 1807 - protein, 16 aa, synthetic construct
TNNQSCLYAEVVQKTA

SEQ ID NO: 1808 - protein, 16 aa, synthetic construct
TNNQSSYPAERVLKTA

SEQ ID NO: 1809 - protein, 16 aa, synthetic construct
TFRRSSYPAEVVQKTA

SEQ ID NO: 1810 - protein, 16 aa, synthetic construct
TNNRHNYPAEVVQKTA

SEQ ID NO: 1811 - protein, 16 aa, synthetic construct
TNNQSSYPAETEGKTA

SEQ ID NO: 1812 - protein, 16 aa, synthetic construct
TNHPSSYPAEVVQKTA

SEQ ID NO: 1813 - protein, 16 aa, synthetic construct
TTGISSYPAEVVQKTA

SEQ ID NO: 1814 - protein, 16 aa, synthetic construct
TNAAQSYPAEVVQKTA

SEQ ID NO: 1815 - protein, 16 aa, synthetic construct
TNNQSSGSMEVVQKTA

SEQ ID NO: 1816 - protein, 16 aa, synthetic construct
TNNARGYPAEVVQKTA

SEQ ID NO: 1817 - protein, 16 aa, synthetic construct
TNNQSSYPFRSVQKTA

SEQ ID NO: 1818 - protein, 16 aa, synthetic construct
TNLTGSYPAEVVQKTA

SEQ ID NO: 1819 - protein, 16 aa, synthetic construct
TNNQSSTYLEVVQKTA

SEQ ID NO: 1820 - protein, 16 aa, synthetic construct
TNNQSSYPPAQVQKTA

SEQ ID NO: 1821 - protein, 16 aa, synthetic construct
THYGSSYPAEVVQKTA

SEQ ID NO: 1822 - protein, 16 aa, synthetic construct
TNNQSRFGAEVVQKTA

SEQ ID NO: 1823 - protein, 16 aa, synthetic construct
TNNVKHYPAEVVQKTA

SEQ ID NO: 1824 - protein, 16 aa, synthetic construct
TNNQSSYPTKSVQKTA

SEQ ID NO: 1825 - protein, 16 aa, synthetic construct
TNNQSSYSQHVVQKTA

SEQ ID NO: 1826 - protein, 16 aa, synthetic construct
TNNQSSGHTEVVQKTA

SEQ ID NO: 1827 - protein, 16 aa, synthetic construct
TNNQSSYPAQTVQKTA

SEQ ID NO: 1828 - protein, 16 aa, synthetic construct
TNNQSSYPAHFPQKTA

SEQ ID NO: 1829 - protein, 16 aa, synthetic construct
TNNQSSYPLAKVQKTA

SEQ ID NO: 1830 - protein, 16 aa, synthetic construct
TNNQSSYTALTVQKTA

SEQ ID NO: 1831 - protein, 16 aa, synthetic construct
TNQRSSYPAEVVQKTA

SEQ ID NO: 1832 - protein, 16 aa, synthetic construct
TNNQSSYPAEVVSKKA

SEQ ID NO: 1833 - protein, 16 aa, synthetic construct
TNNQSSYPASRSQKTA

SEQ ID NO: 1834 - protein, 16 aa, synthetic construct
TNNQSDIRAEVVQKTA

SEQ ID NO: 1835 - protein, 16 aa, synthetic construct
TNNQYSRPAEVVQKTA

SEQ ID NO: 1836 - protein, 16 aa, synthetic construct
TNNQSGLNAEVVQKTA

SEQ ID NO: 1837 - protein, 16 aa, synthetic construct
TNNQSRMMAEVVQKTA

SEQ ID NO: 1838 - protein, 16 aa, synthetic construct
TSAKSSYPAEVVQKTA

SEQ ID NO: 1839 - protein, 16 aa, synthetic construct
TNNQSSYPANGPQKTA

SEQ ID NO: 1840 - protein, 16 aa, synthetic construct
VFYQSSYPAEVVQKTA

SEQ ID NO: 1841 - protein, 16 aa, synthetic construct
TNNQSSYPAERTSKTA

SEQ ID NO: 1842 - protein, 16 aa, synthetic construct
TNSTPSYPAEVVQKTA

SEQ ID NO: 1843 - protein, 16 aa, synthetic construct
TNNQSSYPAEHAVKTA

SEQ ID NO: 1844 - protein, 16 aa, synthetic construct
TNNQSRGHAEVVQKTA

SEQ ID NO: 1845 - protein, 16 aa, synthetic construct
TNNRAGYPAEVVQKTA

SEQ ID NO: 1846 - protein, 16 aa, synthetic construct
TNNQSSYPAEQRLKTA

SEQ ID NO: 1847 - protein, 16 aa, synthetic construct
TNNQSRIMAEVVQKTA

SEQ ID NO: 1848 - protein, 16 aa, synthetic construct
TNNQSTTLAEVVQKTA

SEQ ID NO: 1849 - protein, 16 aa, synthetic construct
TNNQSSYPAEVANKTA

SEQ ID NO: 1850 - protein, 16 aa, synthetic construct
TNNQSSSVKEVVQKTA

SEQ ID NO: 1851 - protein, 16 aa, synthetic construct
TNNQSSYTTSLVQKTA

SEQ ID NO: 1852 - protein, 16 aa, synthetic construct
TNNQSSYPAHNMQKTA

SEQ ID NO: 1853 - protein, 16 aa, synthetic construct
TNNQSSYPAQTTQKTA

SEQ ID NO: 1854 - protein, 16 aa, synthetic construct
TNNQSSYPFNSVQKTA

SEQ ID NO: 1855 - protein, 16 aa, synthetic construct
TNNQSIIRAEVVQKTA

SEQ ID NO: 1856 - protein, 16 aa, synthetic construct
TNNQSLRIAEVVQKTA

SEQ ID NO: 1857 - protein, 16 aa, synthetic construct
TNNQSCCLAEVVQKTA

SEQ ID NO: 1858 - protein, 16 aa, synthetic construct
TNNQSSALLEVVQKTA

SEQ ID NO: 1859 - protein, 16 aa, synthetic construct
TNNQSSYPAEVVQRNT

SEQ ID NO: 1860 - protein, 16 aa, synthetic construct
TNNQLNLPAEVVQKTA

SEQ ID NO: 1861 - protein, 16 aa, synthetic construct
TNNQSRMYAEVVQKTA

SEQ ID NO: 1862 - protein, 16 aa, synthetic construct
TNNQSSYPAEVVLDMA

SEQ ID NO: 1863 - protein, 16 aa, synthetic construct
TNNQSKVMAEVVQKTA

SEQ ID NO: 1864 - protein, 16 aa, synthetic construct
TNNQSSVRQEVVQKTA

SEQ ID NO: 1865 - protein, 16 aa, synthetic construct
TNNQSSYVSKVVQKTA

SEQ ID NO: 1866 - protein, 16 aa, synthetic construct
TNNQSSYPAETHVKTA

SEQ ID NO: 1867 - protein, 16 aa, synthetic construct
TNNQSSHGIEVVQKTA

SEQ ID NO: 1868 - protein, 16 aa, synthetic construct
THSQSSYPAEVVQKTA

SEQ ID NO: 1869 - protein, 16 aa, synthetic construct
TNNQSSYPGNAVQKTA

SEQ ID NO: 1870 - protein, 16 aa, synthetic construct
TNNQSSMNLEVVQKTA

SEQ ID NO: 1871 - protein, 16 aa, synthetic construct
TNNQSSYTARVVQKTA

SEQ ID NO: 1872 - protein, 16 aa, synthetic construct
TNNQSQGAAEVVQKTA

SEQ ID NO: 1873 - protein, 16 aa, synthetic construct
TNNQSSYPAERGAKTA

SEQ ID NO: 1874 - protein, 16 aa, synthetic construct
TNNQSSPILEVVQKTA

SEQ ID NO: 1875 - protein, 16 aa, synthetic construct
TNNQSSYPAETHSKTA

SEQ ID NO: 1876 - protein, 16 aa, synthetic construct
TAFRSSYPAEVVQKTA

SEQ ID NO: 1877 - protein, 16 aa, synthetic construct
TNNVRSYPAEVVQKTA

SEQ ID NO: 1878 - protein, 16 aa, synthetic construct
TNNQSATPAEVVQKTA

SEQ ID NO: 1879 - protein, 16 aa, synthetic construct
TNNQSLTYAEVVQKTA

SEQ ID NO: 1880 - protein, 16 aa, synthetic construct
TNNQKRGPAEVVQKTA

SEQ ID NO: 1881 - protein, 16 aa, synthetic construct
TNNQSSYPMPAVQKTA

SEQ ID NO: 1882 - protein, 16 aa, synthetic construct
TNNQSRNPAEVVQKTA

SEQ ID NO: 1883 - protein, 16 aa, synthetic construct
TNNQSNVRAEVVQKTA

SEQ ID NO: 1884 - protein, 16 aa, synthetic construct
TNNQSKLLAEVVQKTA

SEQ ID NO: 1885 - protein, 16 aa, synthetic construct
TNNQSYMIAEVVQKTA

SEQ ID NO: 1886 - protein, 16 aa, synthetic construct
TNNQSSYPEPKVQKTA

SEQ ID NO: 1887 - protein, 16 aa, synthetic construct
TNNQSSYPAESMLKTA

SEQ ID NO: 1888 - protein, 16 aa, synthetic construct
TNNQSSYPAEILRKTA

SEQ ID NO: 1889 - protein, 16 aa, synthetic construct
TNNQSFMVAEVVQKTA

SEQ ID NO: 1890 - protein, 16 aa, synthetic construct
TNNQSSYPAEKLVKTA

SEQ ID NO: 1891 - protein, 16 aa, synthetic construct
TNNQSSYPAHSGQKTA

SEQ ID NO: 1892 - protein, 16 aa, synthetic construct
TNNQSSYPAENRGKTA

SEQ ID NO: 1893 - protein, 16 aa, synthetic construct
TNNQSHLFAEVVQKTA

SEQ ID NO: 1894 - protein, 16 aa, synthetic construct
TNNQSMTYAEVVQKTA

SEQ ID NO: 1895 - protein, 16 aa, synthetic construct
TNNQSGRQAEVVQKTA

SEQ ID NO: 1896 - protein, 16 aa, synthetic construct
IAPQSSYPAEVVQKTA

SEQ ID NO: 1897 - protein, 16 aa, synthetic construct
TNNQSSYPAEKTGKTA

SEQ ID NO: 1898 - protein, 16 aa, synthetic construct
TNNQSWALAEVVQKTA

SEQ ID NO: 1899 - protein, 16 aa, synthetic construct
TNNQSSAPLEVVQKTA

SEQ ID NO: 1900 - protein, 16 aa, synthetic construct
TNNQSFVKAEVVQKTA

SEQ ID NO: 1901 - protein, 16 aa, synthetic construct
TNNQSSYPAEVGKKTA

SEQ ID NO: 1902 - protein, 16 aa, synthetic construct
TNNQSSYPAEVRKLTA

SEQ ID NO: 1903 - protein, 16 aa, synthetic construct
TNNQYQSPAEVVQKTA

SEQ ID NO: 1904 - protein, 16 aa, synthetic construct
TNNQSSYPAERQNKTA

SEQ ID NO: 1905 - protein, 16 aa, synthetic construct
TNNQSSYTAESMLKTA

SEQ ID NO: 1906 - protein, 16 aa, synthetic construct
TNLTSSYPAEVVQKTA

SEQ ID NO: 1907 - protein, 16 aa, synthetic construct
TNNQSTVKAEVVQKTA

SEQ ID NO: 1908 - protein, 16 aa, synthetic construct
TNNQSSPHTEVVQKTA

SEQ ID NO: 1909 - protein, 16 aa, synthetic construct
TNNQSSYPAVVMQKTA

SEQ ID NO: 1910 - protein, 16 aa, synthetic construct
TNNQSSPGREVVQKTA

SEQ ID NO: 1911 - protein, 16 aa, synthetic construct
TIQTSSYPAEVVQKTA

SEQ ID NO: 1912 - protein, 16 aa, synthetic construct
TNNQSSYPSHDVQKTA

SEQ ID NO: 1913 - protein, 16 aa, synthetic construct
TNNQSSTIFEVVQKTA

SEQ ID NO: 1914 - protein, 16 aa, synthetic construct
TNNQSGKRAEVVQKTA

SEQ ID NO: 1915 - protein, 16 aa, synthetic construct
TNNQSSYPAEVSAKTA

SEQ ID NO: 1916 - protein, 16 aa, synthetic construct
TNNQSTAPAEVVQKTA

SEQ ID NO: 1917 - protein, 16 aa, synthetic construct
TNNQSVRNAEVVQKTA

SEQ ID NO: 1918 - protein, 16 aa, synthetic construct
TNNQSSYPAVNVQKTA

SEQ ID NO: 1919 - protein, 16 aa, synthetic construct
TNNQSVFRAEVVQKTA

SEQ ID NO: 1920 - protein, 16 aa, synthetic construct
TNNQSSYPARDLQKTA

SEQ ID NO: 1921 - protein, 16 aa, synthetic construct
TNNRVTYPAEVVQKTA

SEQ ID NO: 1922 - protein, 16 aa, synthetic construct
TNNQSSYPAGASQKTA

SEQ ID NO: 1923 - protein, 16 aa, synthetic construct
TNNQRLTPAEVVQKTA

SEQ ID NO: 1924 - protein, 16 aa, synthetic construct
TNNQSKMFAEVVQKTA

SEQ ID NO: 1925 - protein, 16 aa, synthetic construct
TNNQSSYTTMVVQKTA

SEQ ID NO: 1926 - protein, 16 aa, synthetic construct
TNNQHSPPAEVVQKTA

SEQ ID NO: 1927 - protein, 16 aa, synthetic construct
TNNQSSYPADHQQKTA

SEQ ID NO: 1928 - protein, 16 aa, synthetic construct
TNNQSSYPAEVVKNHA

SEQ ID NO: 1929 - protein, 16 aa, synthetic construct
TNNQSKGIAEVVQKTA

SEQ ID NO: 1930 - protein, 16 aa, synthetic construct
TNNPFVYPAEVVQKTA

SEQ ID NO: 1931 - protein, 16 aa, synthetic construct
TNNQSSYPAEVNQRTA

SEQ ID NO: 1932 - protein, 16 aa, synthetic construct
TNNQSQARAEVVQKTA

SEQ ID NO: 1933 - protein, 16 aa, synthetic construct
TNAMRSYPAEVVQKTA

SEQ ID NO: 1934 - protein, 16 aa, synthetic construct
TNNQSSYPAEMRTKTA

SEQ ID NO: 1935 - protein, 16 aa, synthetic construct
TNNQSSYPMGTVQKTA

SEQ ID NO: 1936 - protein, 16 aa, synthetic construct
TNNQSKLLAEVVQKPA

SEQ ID NO: 1937 - protein, 16 aa, synthetic construct
TNNGHSYPAEVVQKTA

SEQ ID NO: 1938 - protein, 16 aa, synthetic construct
TNNQSSYPAEKASKTA

SEQ ID NO: 1939 - protein, 16 aa, synthetic construct
TNNQSYLPAEVVQKTA

SEQ ID NO: 1940 - protein, 16 aa, synthetic construct
TNNQSSYPATASQKTA

SEQ ID NO: 1941 - protein, 16 aa, synthetic construct
TNNQSSYPAEVGKSTA

SEQ ID NO: 1942 - protein, 16 aa, synthetic construct
TNNQSSFNVEVVQKTA

SEQ ID NO: 1943 - protein, 16 aa, synthetic construct
TNNQSSRYQEVVQKTA

SEQ ID NO: 1944 - protein, 16 aa, synthetic construct
TNNQQDLPAEVVQKTA

SEQ ID NO: 1945 - protein, 16 aa, synthetic construct
TTSQSSYPAEVVQKTA

SEQ ID NO: 1946 - protein, 16 aa, synthetic construct
TNNQSMGLAEVVQKTA

SEQ ID NO: 1947 - protein, 16 aa, synthetic construct
TNNQSSILAEVVQKTA

SEQ ID NO: 1948 - protein, 16 aa, synthetic construct
TNNQSSYPARESQKTA

SEQ ID NO: 1949 - protein, 16 aa, synthetic construct
TFFKSSYPAEVVQKTA

SEQ ID NO: 1950 - protein, 16 aa, synthetic construct
TNNQSYLQAEVVQKTA

SEQ ID NO: 1951 - protein, 16 aa, synthetic construct
TNNQSSYPLKSVQKTA

SEQ ID NO: 1952 - protein, 16 aa, synthetic construct
TNNQVSNPAEVVQKPA

SEQ ID NO: 1953 - protein, 16 aa, synthetic construct
TNNQSSYPASSVKKTA

SEQ ID NO: 1954 - protein, 16 aa, synthetic construct
SRSQSSYPAEVVQKTA

SEQ ID NO: 1955 - protein, 16 aa, synthetic construct
TNNQSSYPATANQKTA

SEQ ID NO: 1956 - protein, 16 aa, synthetic construct
TNNQRVSPAEVVQKTA

SEQ ID NO: 1957 - protein, 16 aa, synthetic construct
TNNQSWTLAEVVQKTA

SEQ ID NO: 1958 - protein, 16 aa, synthetic construct
TNNQSSTSQEVVQKTA

SEQ ID NO: 1959 - protein, 16 aa, synthetic construct
TNNQSSTWSEVVQKTA

SEQ ID NO: 1960 - protein, 16 aa, synthetic construct
TNNQSFRLAEVVQKTA

SEQ ID NO: 1961 - protein, 16 aa, synthetic construct
TNNQSSYQREVVQKTA

SEQ ID NO: 1962 - protein, 16 aa, synthetic construct
TNNQSSYPAEMTRKTA

SEQ ID NO: 1963 - protein, 16 aa, synthetic construct
TNNQSSYPVHNVQKTA

SEQ ID NO: 1964 - protein, 16 aa, synthetic construct
TNNQSSLHREVVQKTA

SEQ ID NO: 1965 - protein, 16 aa, synthetic construct
TNNQSSFTREVVQKTA

SEQ ID NO: 1966 - protein, 16 aa, synthetic construct
TNNQSSRVNEVVQKTA

SEQ ID NO: 1967 - protein, 16 aa, synthetic construct
TNNQSSYPRGTVQKTA

SEQ ID NO: 1968 - protein, 16 aa, synthetic construct
TPRPSSYPAEVVQKTA

SEQ ID NO: 1969 - protein, 16 aa, synthetic construct
TNNQSRTYAEVVQKTA

SEQ ID NO: 1970 - protein, 16 aa, synthetic construct
TNNQSSYTALVTQKTA

SEQ ID NO: 1971 - protein, 16 aa, synthetic construct
TNNQSFNLAEVVQKTA

SEQ ID NO: 1972 - protein, 16 aa, synthetic construct
TNWQSSYPAEVVQKTA

SEQ ID NO: 1973 - protein, 16 aa, synthetic construct
TLQTSSYPAEVVQKTA

SEQ ID NO: 1974 - protein, 16 aa, synthetic construct
TNNQSSYPAERLQKTA

SEQ ID NO: 1975 - protein, 16 aa, synthetic construct
TNNQSSMLPEVVQKTA

SEQ ID NO: 1976 - protein, 16 aa, synthetic construct
TNNQSSYPESGVQKTA

SEQ ID NO: 1977 - protein, 16 aa, synthetic construct
TNNQSSYPSTNVQKTA

SEQ ID NO: 1978 - protein, 16 aa, synthetic construct
TNNQSSYPFSQVQKTA

SEQ ID NO: 1979 - protein, 16 aa, synthetic construct
TNNQSGQLAEVVQKTA

SEQ ID NO: 1980 - protein, 16 aa, synthetic construct
TNNQSSRWQEVVQKTA

SEQ ID NO: 1981 - protein, 16 aa, synthetic construct
TNNQSSSPAEVVQKPA

SEQ ID NO: 1982 - protein, 16 aa, synthetic construct
TNNQSSIALEVVQKTA

SEQ ID NO: 1983 - protein, 16 aa, synthetic construct
TNNQSSARSEVVQKTA

SEQ ID NO: 1984 - protein, 16 aa, synthetic construct
TNNQSSSVREVVQKTA

SEQ ID NO: 1985 - protein, 16 aa, synthetic construct
TNNQSMSHAEVVQKTA

SEQ ID NO: 1986 - protein, 16 aa, synthetic construct
TNNQSSKTQEVVQKTA

SEQ ID NO: 1987 - protein, 16 aa, synthetic construct
TNNQSSIGTEVVQKTA

SEQ ID NO: 1988 - protein, 16 aa, synthetic construct
TNNQSSYPASAMQKTA

SEQ ID NO: 1989 - protein, 16 aa, synthetic construct
TNNQSSYPAQHTQKTA

SEQ ID NO: 1990 - protein, 16 aa, synthetic construct
TNNQSSYPPKQVQKTA

SEQ ID NO: 1991 - protein, 16 aa, synthetic construct
TNSKNSYPAEVVQKTA

SEQ ID NO: 1992 - protein, 16 aa, synthetic construct
TNNQRSMPAEVVQKTA

SEQ ID NO: 1993 - protein, 16 aa, synthetic construct
TNNQSSSNLEVVQKTA

SEQ ID NO: 1994 - protein, 16 aa, synthetic construct
TNNQVLYPAEVVQKTA

SEQ ID NO: 1995 - protein, 16 aa, synthetic construct
TNNQSIHPAEVVQKTA

SEQ ID NO: 1996 - protein, 16 aa, synthetic construct
TNNQSYNMAEVVQKTA

SEQ ID NO: 1997 - protein, 16 aa, synthetic construct
TNNQSSYTASSAQKTA

SEQ ID NO: 1998 - protein, 16 aa, synthetic construct
TNNQSSNGVEVVQKTA

SEQ ID NO: 1999 - protein, 16 aa, synthetic construct
TNNQSSYPDRLVQKTA

SEQ ID NO: 2000 - protein, 16 aa, synthetic construct
TNNQSSLLAEVVQKTA

SEQ ID NO: 2001 - protein, 16 aa, synthetic construct
TNNQSPTAAEVVQKTA

SEQ ID NO: 2002 - protein, 16 aa, synthetic construct
TNNQSSQLAEVVQKTA

SEQ ID NO: 2003 - protein, 16 aa, synthetic construct
TNNQSSYPTTEVQKTA

SEQ ID NO: 2004 - protein, 16 aa, synthetic construct
TNNQSSYPAEASQKTA

SEQ ID NO: 2005 - protein, 16 aa, synthetic construct
TNNQSWVLAEVVQKTA

SEQ ID NO: 2006 - protein, 16 aa, synthetic construct
TNNQSSIVREVVQKTA

SEQ ID NO: 2007 - protein, 16 aa, synthetic construct
TNNQWTRPAEVVQKTA

SEQ ID NO: 2008 - protein, 16 aa, synthetic construct
TNNQSSYERVVVQKTA

SEQ ID NO: 2009 - protein, 16 aa, synthetic construct
TNNQSSVRSEVVQKTA

SEQ ID NO: 2010 - protein, 16 aa, synthetic construct
TNNQSSELREVVQKTA

SEQ ID NO: 2011 - protein, 16 aa, synthetic construct
TNNQSSYVKSVVQKTA

SEQ ID NO: 2012 - protein, 16 aa, synthetic construct
TNNQSSYPKLQVQKTA

SEQ ID NO: 2013 - protein, 16 aa, synthetic construct
TNNQSSYDVMVVQKTA

SEQ ID NO: 2014 - protein, 16 aa, synthetic construct
TNSNVSYPAEVVQKTA

SEQ ID NO: 2015 - protein, 16 aa, synthetic construct
TNNQWSMPAEVVQKTA

SEQ ID NO: 2016 - protein, 16 aa, synthetic construct
TNNQSSSQLEVVQKTA

SEQ ID NO: 2017 - protein, 16 aa, synthetic construct
TNNQSTANAEVVQKTA

SEQ ID NO: 2018 - protein, 16 aa, synthetic construct
TNNQSSYPATGSQKTA

SEQ ID NO: 2019 - protein, 16 aa, synthetic construct
TNNQSSPSLEVVQKTA

SEQ ID NO: 2020 - protein, 16 aa, synthetic construct
TNNAYTYPAEVVQKTA

SEQ ID NO: 2021 - protein, 16 aa, synthetic construct
TNNQSSYPASVVKKTA

SEQ ID NO: 2022 - protein, 16 aa, synthetic construct
TYAKSSYPAEVVQKTA

SEQ ID NO: 2023 - protein, 16 aa, synthetic construct
TNNQSSYPAVGGQKTA

SEQ ID NO: 2024 - protein, 16 aa, synthetic construct
TNNQSSYDFTVVQKTA

SEQ ID NO: 2025 - protein, 16 aa, synthetic construct
TNNQSSYPAEVVQNVG

SEQ ID NO: 2026 - protein, 16 aa, synthetic construct
TNNQSPHAAEVVQKTA

SEQ ID NO: 2027 - protein, 16 aa, synthetic construct
TNNLHVYPAEVVQKTA

SEQ ID NO: 2028 - protein, 16 aa, synthetic construct
TLKTSSYPAEVVQKTA

SEQ ID NO: 2029 - protein, 16 aa, synthetic construct
TNNQAASPAEVVQKTA

SEQ ID NO: 2030 - protein, 16 aa, synthetic construct
TNLSMSYPAEVVQKTA

SEQ ID NO: 2031 - protein, 16 aa, synthetic construct
TKAFSSYPAEVVQKTA

SEQ ID NO: 2032 - protein, 16 aa, synthetic construct
TAYQSSYPAEVVQKTA

SEQ ID NO: 2033 - protein, 16 aa, synthetic construct
TNNQSQHQAEVVQKTA

SEQ ID NO: 2034 - protein, 16 aa, synthetic construct
TNNQSSVQLEVVQKTA

SEQ ID NO: 2035 - protein, 16 aa, synthetic construct
TNNQSSAFAEVVQKTA

SEQ ID NO: 2036 - protein, 16 aa, synthetic construct
TNNQSAVLAEVVQKTA

SEQ ID NO: 2037 - protein, 16 aa, synthetic construct
LNAQSSYPAEVVQKTA

SEQ ID NO: 2038 - protein, 16 aa, synthetic construct
TNNQSQSSAEVVQKTA

SEQ ID NO: 2039 - protein, 16 aa, synthetic construct
TNNQSSLHAEVVQKTA

SEQ ID NO: 2040 - protein, 16 aa, synthetic construct
TNNFQLYPAEVVQKTA

SEQ ID NO: 2041 - protein, 16 aa, synthetic construct
TNNQSSYPAEVVQSMR

SEQ ID NO: 2042 - protein, 16 aa, synthetic construct
TLLYSSYPAEVVQKTA

SEQ ID NO: 2043 - protein, 16 aa, synthetic construct
TNNQSSTLDEVVQKTA

SEQ ID NO: 2044 - protein, 16 aa, synthetic construct
TNNQTTTPAEVVQKTA

SEQ ID NO: 2045 - protein, 16 aa, synthetic construct
TNNQSSYPAEVVELLA

SEQ ID NO: 2046 - protein, 16 aa, synthetic construct
TNNQVNYPAEVVQKTA

SEQ ID NO: 2047 - protein, 16 aa, synthetic construct
TTSTSSYPAEVVQKTA

SEQ ID NO: 2048 - protein, 16 aa, synthetic construct
TNNQSSYPQIAVQKTA

SEQ ID NO: 2049 - protein, 16 aa, synthetic construct
TNNQSSYPAENLPKTA

SEQ ID NO: 2050 - protein, 16 aa, synthetic construct
TNNQSSYPASSPQKTA

SEQ ID NO: 2051 - protein, 16 aa, synthetic construct
TNNQFMVPAEVVQKTA

SEQ ID NO: 2052 - protein, 16 aa, synthetic construct
TNNTTTYPAEVVQKTA

SEQ ID NO: 2053 - protein, 16 aa, synthetic construct
TPSKSSYPAEVVQKTA

SEQ ID NO: 2054 - protein, 16 aa, synthetic construct
TNYLMSYPAEVVQKTA

SEQ ID NO: 2055 - protein, 16 aa, synthetic construct
TNLAMSYPAEVVQKTA

SEQ ID NO: 2056 - protein, 16 aa, synthetic construct
TNNQSSLMQEVVQKTA

SEQ ID NO: 2057 - protein, 16 aa, synthetic construct
TNNQSSYPNAIVQKTA

SEQ ID NO: 2058 - protein, 16 aa, synthetic construct
TNNQSSYPAEVRTATA

SEQ ID NO: 2059 - protein, 16 aa, synthetic construct
TNNQSSSMTEVVQKTA

SEQ ID NO: 2060 - protein, 16 aa, synthetic construct
TNLSPSYPAEVVQKTA

SEQ ID NO: 2061 - protein, 16 aa, synthetic construct
TNNQSSYPAESSRKTA

SEQ ID NO: 2062 - protein, 16 aa, synthetic construct
TNNPLTYPAEVVQKTA

SEQ ID NO: 2063 - protein, 16 aa, synthetic construct
TNNLSTYPAEVVQKTA

SEQ ID NO: 2064 - protein, 16 aa, synthetic construct
TNSSLSYQAEVVQKTA

SEQ ID NO: 2065 - protein, 16 aa, synthetic construct
TNSSLSYTAEVVQKTA

SEQ ID NO: 2066 - protein, 16 aa, synthetic construct
TNSSLYYPAEVVQKTA

SEQ ID NO: 2067 - protein, 16 aa, synthetic construct
TNTSATYPAEVVQKTA

SEQ ID NO: 2068 - protein, 16 aa, synthetic construct
TNSSLSYPAEVVQKTA

SEQ ID NO: 2069 - protein, 16 aa, synthetic construct
TNSSLSYPAEEVQKTA

SEQ ID NO: 2070 - protein, 16 aa, synthetic construct
TNSSLSYPAEVVQKTD

SEQ ID NO: 2071 - protein, 16 aa, synthetic construct
TNSSLSYPAEVVQNTA

SEQ ID NO: 2072 - protein, 16 aa, synthetic construct
TNSSLSYPAEVVQKNA

SEQ ID NO: 2073 - protein, 16 aa, synthetic construct
TNSSLSYPAEVVQKPA

SEQ ID NO: 2074 - protein, 16 aa, synthetic construct
TNNQTSTEAEVVQKTA

SEQ ID NO: 2075 - protein, 16 aa, synthetic construct
TNKSATYPAEVVQKTA

SEQ ID NO: 2076 - protein, 16 aa, synthetic construct
TNSSLSYPADVVQKTA

SEQ ID NO: 2077 - protein, 16 aa, synthetic construct
TNNQSSYPAEVVQKTA

SEQ ID NO: 2078 - protein, 16 aa, synthetic construct
TNNQSSYPAEVVQKNA

SEQ ID NO: 2079 - protein, 16 aa, synthetic construct
TNNQSSYPSTDVQKTA

SEQ ID NO: 2080 - protein, 16 aa, synthetic construct
TNNKGLYPAEVVQKTA

SEQ ID NO: 2081 - protein, 8 aa, synthetic construct
NTDAVNQA

SEQ ID NO: 2082 - protein, 8 aa, synthetic construct
QAHRVPVE

SEQ ID NO: 2083 - protein, 8 aa, synthetic construct
RYMTVKTQ

SEQ ID NO: 2084 - protein, 8 aa, synthetic construct
TAKILSTE

SEQ ID NO: 2085 - protein, 8 aa, synthetic construct
THSGVVIR

SEQ ID NO: 2086 - protein, 8 aa, synthetic construct
TMRTAQSK

SEQ ID NO: 2087-2099 - skipped (13 entries)

SEQ ID NO: 2100 - DNA, 1184 bp, synthetic construct
  source 1..1184: mol_type = other DNA
cgtgaggctccggtgcccgtcagtgggcagagcgcacatcgcccacagtccccgagaagttggggggaggggtcggcaattgaaccggtgcctagagaaggtggcgcggggtaaactgggaaagtgatgtcgtgtactggctccgcctttttcccgagggtgggggagaaccgtatataagtgcagtagtcgccgtgaacgttctttttcgcaacgggtttgccgccagaacacaggtaagtgccgtgtgtggttcccgcgggcctggcctctttacgggttatggcccttgcgtgccttgaattacttccacctggctgcagtacgtgattcttgatcccgagcttcgggttggaagtgggtgggagagttcgaggccttgcgcttaaggagccccttcgcctcgtgcttgagttgaggcctggcctgggcgctggggccgccgcgtgcgaatctggtggcaccttcgcgcctgtctcgctgctttcgataagtctctagccatttaaaatttttgatgacctgctgcgacgctttttttctggcaagatagtcttgtaaatgcgggccaagatctgcacactggtatttcggtttttggggccgcgggcggcgacggggcccgtgcgtcccagcgcacatgttcggcgaggcggggcctgcgagcgcggccaccgagaatcggacgggggtagtctcaagctggccggcctgctctggtgcctggcctcgcgccgccgtgtatcgccccgccctgggcggcaaggctggcccggtcggcaccagttgcgtgagcggaaagatggccgcttcccggccctgctgcagggagctcaaaatggaggacgcggcgctcgggagagcgggcgggtgagtcacccacacaaaggaaaagggcctttccgtcctcagccgtcgcttcatgtgactccacggagtaccgggcgccgtccaggcacctcgattagttctcgagcttttggagtacgtcgtctttaggttggggggaggggttttatgcgatggagtttccccacactgagtgggtggagactgaagttaggccagcttggcacttgatgtaattctccttggaatttgccctttttgagtttggatcttggttcattctcaagcctcagacagtggttcaaagtttttttcttccatttcaggtgtcgtga

SEQ ID NO: 2101 - DNA, 227 bp, synthetic construct
  source 1..227: mol_type = other DNA
gcccgtcagtgggcagagcgcacatcgcccacagtccccgagaagttggggggaggggtcggcaattgaaccggtgcctagagaaggtggcgcggggtaaactgggaaagtgatgtcgtgtactggctccgcctttttcccgagggtgggggagaaccgtatataagtgcagtagtcgccgtgaacgttctttttcgcaacgggtttgccgccagaacacgcgtaag

SEQ ID NO: 2102 - skipped

SEQ ID NO: 2103 - DNA, 16 bp, synthetic construct
  source 1..16: mol_type = other DNA
ggtggagaagagcatg

SEQ ID NO: 2104 - DNA, 27 bp, synthetic construct
  source 1..27: mol_type = other DNA
gtcatcactgaggtggagaagagcatg

SEQ ID NO: 2105-2107 - skipped (3 entries)

SEQ ID NO: 2108 - DNA, 222 bp, synthetic construct
  source 1..222: mol_type = other DNA
gcccgtcagtgggcagagcgcacatcgcccacagtccccgagaagttggggggaggggtcggcaattgaaccggtgcctagagaaggtggcgcggggtaaactgggaaagtgatgtcgtgtactggctccgcctttttcccgagggtgggggagaaccgtatataagtgcagtagtcgccgtgaacgttctttttcgcaacgggtttgccgccagaacacag

SEQ ID NO: 2109 - DNA, 222 bp, synthetic construct
  source 1..222: mol_type = other DNA
gcccgtcagtgggcagagcgcacatcgcccacagtccccgagaagttggggggaggggtcggcaattgaaccggtgcctagagaaggtggcgcggggtaaactgggaaagtgatgtcgtgtactggctccgcctttttcccgagggtgggggagaaccgtatataagtgcagtagtcgccgtgaacgttctttttcgcaacgggtttgccgccagaacacgc

SEQ ID NO: 2110 - skipped

SEQ ID NO: 2111 - DNA, 229 bp, synthetic construct
  source 1..229: mol_type = other DNA
gtgcccgtcagtgggcagagcgcacatcgcccacagtccccgagaagttggggggaggggtcggcaattgaaccggtgcctagagaaggtggcgcggggtaaactgggaaagtgatgtcgtgtactggctccgcctttttcccgagggtgggggagaaccgtatataagtgcagtagtcgccgtgaacgttctttttcgcaacgggtttgccgccagaacacgcgtaag

SEQ ID NO: 2112 - DNA, 235 bp, synthetic construct
  source 1..235: mol_type = other DNA
gctccggtgcccgtcagtgggcagagcgcacatcgcccacagtccccgagaagttggggggaggggtcggcaattgaaccggtgcctagagaaggtggcgcggggtaaactgggaaagtgatgtcgtgtactggctccgcctttttcccgagggtgggggagaaccgtatataagtgcagtagtcgccgtgaacgttctttttcgcaacgggtttgccgccagaacacgcgtaag

SEQ ID NO: 2113 - DNA, 241 bp, synthetic construct
  source 1..241: mol_type = other DNA
cgtgaggctccggtgcccgtcagtgggcagagcgcacatcgcccacagtccccgagaagttggggggaggggtcggcaattgaaccggtgcctagagaaggtggcgcggggtaaactgggaaagtgatgtcgtgtactggctccgcctttttcccgagggtgggggagaaccgtatataagtgcagtagtcgccgtgaacgttctttttcgcaacgggtttgccgccagaacacgcgtaag

SEQ ID NO: 2114 - DNA, 236 bp, synthetic construct
  source 1..236: mol_type = other DNA
cgtgaggctccggtgcccgtcagtgggcagagcgcacatcgcccacagtccccgagaagttggggggaggggtcggcaattgaaccggtgcctagagaaggtggcgcggggtaaactgggaaagtgatgtcgtgtactggctccgcctttttcccgagggtgggggagaaccgtatataagtgcagtagtcgccgtgaacgttctttttcgcaacgggtttgccgccagaacacag

SEQ ID NO: 2115 - DNA, 246 bp, synthetic construct
  source 1..246: mol_type = other DNA
gcatgcgtgaggctccggtgcccgtcagtgggcagagcgcacatcgcccacagtccccgagaagttggggggaggggtcggcaattgaaccggtgcctagagaaggtggcgcggggtaaactgggaaagtgatgtcgtgtactggctccgcctttttcccgagggtgggggagaaccgtatataagtgcagtagtcgccgtgaacgttctttttcgcaacgggtttgccgccagaacacgcgtaag

SEQ ID NO: 2116 - DNA, 241 bp, synthetic construct
  source 1..241: mol_type = other DNA
gcatgcgtgaggctccggtgcccgtcagtgggcagagcgcacatcgcccacagtccccgagaagttggggggaggggtcggcaattgaaccggtgcctagagaaggtggcgcggggtaaactgggaaagtgatgtcgtgtactggctccgcctttttcccgagggtgggggagaaccgtatataagtgcagtagtcgccgtgaacgttctttttcgcaacgggtttgccgccagaacacag

SEQ ID NO: 2117 - DNA, 257 bp, synthetic construct
  source 1..257: mol_type = other DNA
ggtggagaagagcatgcgtgaggctccggtgcccgtcagtgggcagagcgcacatcgcccacagtccccgagaagttggggggaggggtcggcaattgaaccggtgcctagagaaggtggcgcggggtaaactgggaaagtgatgtcgtgtactggctccgcctttttcccgagggtgggggagaaccgtatataagtgcagtagtcgccgtgaacgttctttttcgcaacgggtttgccgccagaacacgcgtaag

SEQ ID NO: 2118 - DNA, 252 bp, synthetic construct
  source 1..252: mol_type = other DNA
ggtggagaagagcatgcgtgaggctccggtgcccgtcagtgggcagagcgcacatcgcccacagtccccgagaagttggggggaggggtcggcaattgaaccggtgcctagagaaggtggcgcggggtaaactgggaaagtgatgtcgtgtactggctccgcctttttcccgagggtgggggagaaccgtatataagtgcagtagtcgccgtgaacgttctttttcgcaacgggtttgccgccagaacacag

SEQ ID NO: 2119 - DNA, 268 bp, synthetic construct
  source 1..268: mol_type = other DNA
gtcatcactgaggtggagaagagcatgcgtgaggctccggtgcccgtcagtgggcagagcgcacatcgcccacagtccccgagaagttggggggaggggtcggcaattgaaccggtgcctagagaaggtggcgcggggtaaactgggaaagtgatgtcgtgtactggctccgcctttttcccgagggtgggggagaaccgtatataagtgcagtagtcgccgtgaacgttctttttcgcaacgggtttgccgccagaacacgcgtaag

SEQ ID NO: 2120 - DNA, 263 bp, synthetic construct
  source 1..263: mol_type = other DNA
gtcatcactgaggtggagaagagcatgcgtgaggctccggtgcccgtcagtgggcagagcgcacatcgcccacagtccccgagaagttggggggaggggtcggcaattgaaccggtgcctagagaaggtggcgcggggtaaactgggaaagtgatgtcgtgtactggctccgcctttttcccgagggtgggggagaaccgtatataagtgcagtagtcgccgtgaacgttctttttcgcaacgggtttgccgccagaacacag

SEQ ID NO: 2121-4672 - skipped (2552 entries)

SEQ ID NO: 4673 - DNA, 23 bp, synthetic construct
  source 1..23: mol_type = other DNA
acaaacaccattgtcacactcca

SEQ ID NO: 4674 - DNA, 71 bp, synthetic construct
  source 1..71: mol_type = other DNA
acaaacaccattgtcacactccacacaaacaccattgtcacactccacacaaacaccattgtcacactcca

SEQ ID NO: 4675 - DNA, 23 bp, synthetic construct
  source 1..23: mol_type = other DNA
tccataaagtaggaaacactaca

SEQ ID NO: 4676 - DNA, 22 bp, synthetic construct
  source 1..22: mol_type = other DNA
agtgaattctaccagtgccata

SEQ ID NO: 4677 - DNA, 24 bp, synthetic construct
  source 1..24: mol_type = other DNA
agtgtgagttctaccattgccaaa

SEQ ID NO: 4678 - DNA, 23 bp, synthetic construct
  source 1..23: mol_type = other DNA
agcaaaaatgtgctagtgccaaa

SEQ ID NO: 4679 - DNA, 22 bp, synthetic construct
  source 1..22: mol_type = other DNA
atacatacttctttacattcca
